(19) United States
(12) Patent Application Publication
(10) Pub. No.: US 2023/0416826 A1
(43) Pub. Date: Dec. 28, 2023

(54) TARGET-ENRICHED MULTIPLEXED PARALLEL ANALYSIS FOR ASSESSMENT OF FETAL DNA SAMPLES

(71) Applicant: NIPD GENETICS PUBLIC COMPANY LIMITED, Nicosia (CY)

(72) Inventors: George Koumbaris, Lithrodontas (CY); Marios Ioannides, Nicosia (CY); Elena Kypri, Nicosia (CY); Acilleas Achilleos, Limassol (CY); Petros Mina, Nicosia (CY); Kyriakos Tsangaras, Limassol (CY); Philippos Patsalis, Nicosia (CY)

(21) Appl. No.: 18/316,080

(22) Filed: May 11, 2023

Related U.S. Application Data
(63) Continuation of application No. 16/625,437, filed on Dec. 20, 2019, now Pat. No. 11,649,500.
(60) Provisional application No. 62/529,790, filed on Jul. 7, 2017.

(51) Int. Cl. C12Q 1/6883; C12Q 1/6806

(52) U.S. Cl. CPC C12Q 1/6883; C12Q 1/6806; C12Q 2600/156

(57) ABSTRACT

The invention provides methods for assessment of fetal DNA samples using target-enriched multiplexed parallel analysis. The methods of the invention utilize Target Capture Sequences (TACS) to thereby enrich for target sequences of interest, followed by massive parallel sequencing and statistical analysis of the enriched population. The methods can be used with fetal or embryonic DNA samples, for example for the detection of the presence of genetic abnormalities, e.g., for purposes of IVF Pre-implantation Genetic Screening (PGS) and Diagnosis (PGD). Kits for carrying out the methods of the invention are also provided.

### CROSS REFERENCE TO RELATED PATENT APPLICATIONS

[0001] This application is a continuation application of U.S. application Ser. No. 16/625,437, which was filed on Dec. 20, 2019 (now U.S. Pat. No. 11,649,500), which is a U.S. national phase application of International Application No. PCT/EP2018/068414, which was filed on Jul. 6, 2018, and claims priority to U.S. Provisional Application No. 62/529,790, which was filed on Jul. 7, 2017. The content of these earlier filed applications is hereby incorporated by reference herein in its entirety.

### INCORPORATION OF THE SEQUENCE LISTING

[0002] The present application contains a sequence listing submitted herewith, containing the file name “37578_0071U2_Sequence_Listing” which is 2,248,704 bytes in size, created on May 3, 2023, and is herein incorporated by reference in its entirety pursuant to 37 C.F.R. § 1.52(e)(5).

### FIELD OF THE INVENTION

[0003] The invention is in the field of biology, medicine and chemistry, more in particular in the field of molecular biology and more in particular in the field of molecular diagnostics.

### BACKGROUND OF THE INVENTION

[0004] The discovery of free fetal DNA (ffDNA) in maternal circulation (Lo, Y. M. et al. (1997) Lancet 350:485-487) was a landmark towards the development of non-invasive prenatal testing for chromosomal abnormalities and has opened up new possibilities in the clinical setting. However, direct analysis of the limited amount of ffDNA in the presence of an excess of maternal DNA is a great challenge for Non-Invasive Prenatal Testing (NIPT) of chromosomal abnormalities. The implementation of next generation sequencing (NGS) technologies in the development of NIPT has revolutionized the field. In 2008, two independent groups demonstrated that NIPT of trisomy 21 could be achieved using next generation massively parallel shotgun sequencing (MPSS) (Chiu, R. W. et al. (2008) Proc. Natl. Acad. Sci. USA 105:20458-20463; Fan, H. C. et al. (2008) Proc. Natl. Acad. Sci. USA 105:16266-162710). The new era of NIPT for chromosomal abnormalities has opened new possibilities for the implementation of these technologies into clinical practice. Biotechnology companies that are partly or wholly dedicated to the development of NIPT tests have initiated large-scale clinical studies towards their implementation (Palomaki, G. E. et al. (2011) Genet. Med. 13:913-920; Ehrich, M. et al. (2011) Am. J. Obstet. Gynecol. 204:205e1-11; Chen, E. Z. et al. (2011) PLoS One 6:e21791; Sehnert, A. J. et al. (2011) Clin. Chem. 57:1042-1049; Palomaki, G. E. et al. (2012); Genet. Med. 14:296-305; Bianchi, D. W. et al. (2012) Obstet. Gynecol. 119:890-901; Zimmerman, B. et al. (2012) Prenat. Diag. 32:1233-1241; Nicolaides, K. H. et al. (2013) Prenat. Diagn. 33:575-579; Sparks, A. B. et al. (2012) Prenat. Diagn. 32:3-9)

[0005] Initial NIPT approaches used massively parallel shotgun sequencing (MPSS) NGS methodologies (see e.g., U.S. Pat. Nos. 7,888,017; 8,008,018; 8,195,415; 8,296,076; 8,682,594; US Patent Publication 20110201507; US Patent Publication 20120270739). Thus, these approaches are whole genome-based, in which the entire maternal sample containing both maternal DNA and free fetal DNA is subjected to amplification, sequencing and analysis.

[0006] More recently, targeted-based NGS approaches for NIPT, in which only specific sequences of interest are sequenced, have been developed. For example, a targeted NIPT approach using TArget Capture Sequences (TACS) for identifying fetal chromosomal abnormalities using a maternal blood sample has been described (PCT Publication WO 2016/189388; US Patent Publication 2016/0340733; Koumbaris, G. et al. (2015) Clinical chemistry, 62(6), pp. 848-855).

[0007] Such targeted approaches require significantly less sequencing than the MPSS approaches, since sequencing is only performed on specific loci on the target sequence of interest rather than across the whole genome. Additional methodologies for NGS-based approaches are still needed, in particular approaches that can target specific sequences of interest, thereby greatly reducing the amount of sequencing needed as compared to whole genome-based approaches, as well as increasing the read-depth of regions of interest, thus enabling detection of low signal to noise ratio regions. In particular, additional methodologies are still needed that allow for genetic aberrations present in diminutive amounts in a sample can be reliably detected. For example, additional methodologies are still needed that allow for analysis of DNA samples that contain predominantly fetal or embryonic DNA, since such samples contain only diminutive amounts of fetal or embryonic DNA.

### SUMMARY OF THE INVENTION

[0008] This invention provides improved methods for enriching targeted genomic regions of interest to be analyzed by multiplexed parallel sequencing, wherein the DNA sample used in the method contains predominantly or only fetal/embryonic DNA. Accordingly, the methods allow for analysis of very small starting amounts of fetal or embryonic DNA. The methods of the disclosure can be used in the analysis of fetal or embryonic DNA samples, e.g., for the presence of genetic abnormalities, for example for purposes of IVF Pre-implantation Genetic Screening (PGS) and Diagnosis (PGD). The methods of the invention utilize a pool of TArget Capture Sequences (TACS) designed such that the sequences within the pool have features that optimize the efficiency, specificity and accuracy of genetic assessment. In one embodiment, the pool of TACS comprises member sequences whose binding encompasses all chromosomes within the human genome (chromosomes 1-22, X and Y), thereby allowing for evaluation of the entire human genome in a single fetal/embryonic DNA sample.

[0009] Accordingly, in one aspect, the invention pertains to a method of testing for risk of a genetic abnormality in a DNA sample comprising predominantly fetal or embryonic DNA and comprising genomic sequences of interest, the method comprising:
[0010] (a) preparing a sequencing library from the DNA sample comprising predominantly fetal or embryonic DNA;
[0011] (b) hybridizing the sequencing library to a pool of double-stranded TArget Capture Sequences (TACS) wherein the pool of TACS comprises sequences that bind to one or more genomic sequences of interest comprising a genetic abnormality;
[0012] (c) isolating members of the sequencing library that bind to the pool of TACS to obtain an enriched library;
[0013] (d) amplifying and sequencing the enriched library; and
[0014] (e) performing statistical analysis on the enriched library sequences to thereby determine risk of a genetic abnormality in the DNA sample.

[0015] In one embodiment:
[0016] (i) each member sequence within the pool of TACS is between 100-500 base pairs in length, each member sequence having a 5′ end and a 3′ end;
[0017] (ii) each member sequence binds to the same genomic sequence of interest at least 50 base pairs away, on both the 5′ end and the 3′ end, from regions harboring Copy Number Variations (CNVs), Segmental duplications or repetitive DNA elements; and
[0018] (iii) the GC content of the pool of TACS is between 19% and 80%, as determined by calculating the GC content of each member within the pool of TACS.

[0019] In various embodiments, the DNA sample is from, for example, a pre-implantation embryo, intact trophoblasts collected from a maternal Papanicolaou smear or a fetal cell found in maternal plasma. In one embodiment, the DNA sample is obtained directly from fetal or embryonic tissue. In certain embodiments, the DNA sample is obtained directly from fetal tissue, or amniotic fluid, or chorionic villi, or medium where products of conception were grown.

[0020] In one embodiment, the pool of TACS comprises members that bind to chromosomes 1-22, X and Y of the human genome. In one embodiment, each member sequence within the pool of TACS is at least 160 base pairs in length. In certain embodiments, the GC content of the pool of TACS is between 19% and 80% or is between 19% and 46%. Alternative % ranges for the GC content of the pool of TACS are described herein.

[0021] In one embodiment, the pool of TACS comprises a plurality of TACS families, wherein each member of a TACS family binds to the same target sequence of interest but with different start and/or stop positions on the sequence with respect to a reference coordinate system (i.e., binding of TACS family members to the target sequence is staggered) to thereby enrich for target sequences of interest, followed by massive parallel sequencing and statistical analysis of the enriched population. The use of families of TACS with the TACS pool that bind to each target sequence of interest, as compared to use of a single TACS within the TACS pool that binds to each target sequence of interest, significantly increases enrichment for the target sequences of interest, as evidenced by a greater than 50% average increase in read-depth for the family of TACS versus a single TACS.

[0022] Accordingly, in one embodiment, the pool of TACS comprises a plurality of TACS families directed to different genomic sequences of interest, wherein each TACS family comprises a plurality of member sequences, wherein each member sequence binds to the same genomic sequence of interest but has different start and/or stop positions with respect to a reference coordinate system for the genomic sequence of interest.

[0023] In certain embodiments, each TACS family comprises at least 3 member sequences or at least 5 member sequences. Alternative numbers of member sequences in each TACS family are described herein. In one embodiment, the pool of TACS comprises at least 50 different TACS families. Alternative numbers of different TACS families within the pool of TACS are described herein. In certain embodiments, the start and/or stop positions for the member sequences within a TACS family, with respect to a reference coordinate system for the genomic sequence of interest, are staggered by at least 3 base pairs or by at least 10 base pairs. Alternative lengths (sizes) for the number of base pairs within the stagger are described herein.

[0024] In one embodiment, the genomic abnormality is a chromosomal aneuploidy. In other embodiments, the genomic abnormality is a structural abnormality, including but not limited to copy number changes including microdeletions and microduplications, insertions, deletions, translocations, inversions and small-size mutations including point mutations and mutational signatures.

[0025] In one embodiment, the pool of TACS is fixed to a solid support. For example, in one embodiment, the TACS are biotinylated and are bound to streptavidin-coated magnetic beads.

[0026] In one embodiment, amplification of the enriched library is performed in the presence of blocking sequences that inhibit amplification of wild-type sequences.

[0027] In one embodiment, members of the sequencing library that bind to the pool of TACS are partially complementary to the TACS.

[0028] In one embodiment, the statistical analysis comprises a segmentation algorithm, for example, likelihood-based segmentation, segmentation using small overlapping windows, segmentation using parallel pairwise testing, and combinations thereof. In one embodiment, the statistical analysis comprises a score-based classification system. In on embodiment, sequencing of the enriched library provides a read-depth for the genomic sequences of interest and read-depths for reference loci and the statistical analysis comprises applying an algorithm that tests sequentially the read-depth of the loci of from the genomic sequences of interest against the read-depth of the reference loci, the algorithm comprising steps for: (a) removal of inadequately sequenced loci; (b) GC-content bias alleviation; and (c) ploidy status determination. In one embodiment, GC-content bias is alleviated by grouping together loci of matching GC content. In one embodiment, sequencing of the enriched library provides the number and size of sequenced fragments for TACS-specific coordinates and the statistical analysis comprises applying an algorithm that tests sequentially the fragment-size proportion for the genomic sequence of interest against the fragment-size proportion of the reference loci, the algorithm comprising steps for: (a) removal of fragment-size outliers; (b) fragment-size proportion calculation; and (c) ploidy status determination.

[0029] In another aspect, the invention pertains to a method of testing for risk of a genetic abnormality in a DNA sample comprising predominantly fetal or embryonic DNA and comprising genomic sequences of interest, the method comprising:
[0030] (a) preparing a sequencing library from the DNA sample comprising predominantly fetal or embryonic DNA;
[0031] (b) hybridizing the sequencing library to a pool of double-stranded TArget Capture Sequences (TACS), wherein the pool of TACS comprises a plurality of TACS families directed to different genomic sequences of interest, wherein each TACS family comprises a plurality of member sequences, wherein each member sequence binds to the same genomic sequence of interest but has different start and/or stop positions with respect to a reference coordinate system for the genomic sequence of interest, and further wherein:
   [0032] (i) each member sequence within each TACS family is between 100-500 base pairs in length, each member sequence having a 5′ end and a 3′ end;
   [0033] (ii) each member sequence binds to the same genomic sequence of interest at least 50 base pairs away, on both the 5′ end and the 3′ end, from regions harboring Copy Number Variations (CNVs), Segmental duplications or repetitive DNA elements; and
   [0034] (iii) the GC content of the pool of TACS is between 19% and 80%, as determined by calculating the GC content of each member within each family of TACS;
[0035] (c) isolating members of the sequencing library that bind to the pool of TACS to obtain an enriched library;
[0036] (d) amplifying and sequencing the enriched library; and
[0037] (e) performing statistical analysis on the enriched library sequences to thereby determine risk of a genetic abnormality in the DNA sample.

[0038] In another aspect, kits for performing the methods of the invention are also encompassed.

### BRIEF DESCRIPTION OF THE FIGURES

[0039] The patent or application file contains at least one drawing executed in color. Copies of this patent or patent application publication with color drawing(s) will be provided by the Office upon request and payment of the necessary fee.

[0040] FIG. 1 is a schematic diagram of multiplexed parallel analysis of targeted genomic regions for non-invasive prenatal testing using TArget Capture Sequences (TACS).

[0041] FIG. 2 is a listing of exemplary chromosomal regions for amplifying TACS that bind to for example chromosomes 13, 18, 21 or X. A more extensive list is shown in Table 1 below. The TACS in Table 1 are those preferred herein.

[0042] FIG. 3 is a schematic diagram of TACS-based enrichment of a sequence of interest (bold line) using a single TACS (left) versus TACS-based enrichment using a family of TACS (right).

[0043] FIGS. 4A-4B are graphs showing enrichment using families of TACS versus a single TACS, as illustrated by increase in the average read-depth. FIG. 4A shows loci enriched using a family of TACS (square symbol) as compared to loci enriched using a single TACS (X symbol), with different target sequences shown on the X-axis and the fold change in read-depth shown on the Y-axis. FIG. 4B is a bar graph illustrating the average fold-increase in read-depth (54.7%) using a family of TACS (right) versus a single TACS (left).

[0044] FIG. 5 is a graph of results from fetal DNA samples that underwent ploidy status determination using likelihood-based segmentation analysis and whole-genome sequencing data. The horizontal blue line indicates the average read-depth of each chromosome. The red lines indicate threshold intervals of expected diploids. Data above the top red line is classified as more than diploid and data below the red line is classified as less than diploid. The top panel illustrates the results of a euploid female sample (i.e., a female fetus with diploid X chromosome, no Y chromosome, and without any ploidy abnormalities present). The bottom panel illustrates the results of a female aneuploid sample (i.e., a female fetus with diploid X chromosome and no Y chromosome) with monosomy 18 and monosomy 20. Values on the y-axis are log of read-depth.

[0045] FIG. 6 is a graph of results from fetal DNA samples that underwent ploidy status determination by whole genome sequencing, followed by segmentation analysis using small overlapping windows analysis. The horizontal blue line indicates the average read-depth of each chromosome. The red lines indicate threshold intervals of expected diploids. The top panel illustrates the results of a euploid male sample (i.e., a male fetus with a single copy of X and Y chromosomes and without any ploidy abnormalities present). The bottom panel illustrates the results of an aneuploid male sample (i.e., a male fetus with a single copy of X and Y chromosomes) and with aneuploidies on chromosomes 13 and 19 (trisomy 13 and mosaicism on chromosome 19). Values are log of read-depth.

[0046] FIG. 7 is a graph of results from fetal DNA samples that underwent ploidy status determination by whole genome sequencing, followed by segmentation analysis using parallel pairwise testing. The top panel illustrates the results of a normal (euploid) sample and the bottom panel illustrates the results of an aneuploidy sample with aneuploidies on chromosomes 1, 2, 13, 15, 16, 19, and 20.

[0047] FIG. 8 is a graph depicting results from fetal DNA samples that underwent ploidy status determination using TACS-based enrichment, followed by a score-based classification. As per the key, samples plotted with N indicate normal ploidy status, the sample plotted with P illustrates partial trisomy, the samples plotted with T indicate trisomy and the samples plotted with M indicate monosomy.

[0048] FIG. 9 is a dot plot graph showing results of a fragments-based test for detecting increased numbers of smaller-size fragments in a mixed sample. An abnormal, aneuploid sample, with an estimated fetal fraction of 2.8%, was correctly detected using this method. The black dots are individual samples. The x-axis shows the sample index. The y-axis shows the score result of the fragments-size based method. A score result greater than the threshold shown by the grey line indicates a deviation from the expected size of fragments illustrating the presence of aneuploidy.

[0049] FIG. 10 is a graph of results from fetal DNA samples that underwent ploidy status determination using likelihood-based segmentation analysis and TACS-based enrichment whole genome sequencing data. The horizontal blue line indicates the average read-depth of each chromosome. The red lines indicate threshold intervals of expected diploids. Data above the top red line is classified as more than diploid and data below the red line is classified as less than diploid. The top panel illustrates the results of a euploid male sample (i.e., a male fetus with one copy of chromosome X chromosome and one copy of chromosome Y, and without any ploidy abnormalities present). The bottom panel illustrates the results of a male aneuploid sample with trisomy 13 and monosomy 21. Values on the y-axis are log-based transformations of read-depth.

[0050] FIG. 11 is a graph of results from fetal DNA samples that underwent ploidy status determination using likelihood-based segmentation analysis and TACS-based enrichment data. The horizontal blue line indicates the average read-depth of each chromosome. The red lines indicate threshold intervals of expected diploids. Data above the top red line is classified as more than diploid and data below the red line is classified as less than diploid. The top panel illustrates the results of a euploid male sample (i.e., a male fetus with one copy of chromosome X chromosome and one copy of chromosome Y, and without any ploidy abnormalities present). The bottom panel illustrates the results of a male aneuploid sample with trisomy 13 and monosomy 21. Values on the y-axis are log-based transformations of read-depth.

[0051] Table 1 shows exemplary and preferred TACS positions. The corresponding sequences are depicted in the sequence protocol.

| Ch. | Start | Stop | GC content |
|---|---|---|---|
| chr1 | 1321966 | 1322216 | 0.348 |
| chr1 | 2223227 | 2223477 | 0.348 |
| chr1 | 3047692 | 3047942 | 0.348 |
| chr1 | 4134402 | 4134652 | 0.348 |
| chr1 | 5007713 | 5007963 | 0.348 |
| chr1 | 5865510 | 5865760 | 0.348 |
| chr1 | 6714342 | 6714592 | 0.348 |
| chr1 | 7651255 | 7651505 | 0.348 |
| chr1 | 8470924 | 8471174 | 0.348 |
| chr1 | 9407377 | 9407627 | 0.324 |
| chr1 | 10209181 | 10209431 | 0.296 |
| chr1 | 11076652 | 11076902 | 0.348 |
| chr1 | 12295996 | 12296246 | 0.348 |
| chr1 | 13923467 | 13923717 | 0.348 |
| chr1 | 14770392 | 14770642 | 0.348 |
| chr1 | 15578046 | 15578296 | 0.348 |
| chr1 | 16593363 | 16593613 | 0.348 |
| chr1 | 17424880 | 17425130 | 0.348 |
| chr1 | 18298306 | 18298556 | 0.348 |
| chr1 | 19423315 | 19423565 | 0.348 |
| chr1 | 20230997 | 20231247 | 0.348 |
| chr1 | 21064982 | 21065232 | 0.348 |
| chr1 | 22007055 | 22007305 | 0.348 |
| chr1 | 22807861 | 22808111 | 0.344 |
| chr1 | 23611830 | 23612080 | 0.348 |
| chr1 | 24692851 | 24693101 | 0.348 |
| chr1 | 25500621 | 25500871 | 0.348 |
| chr1 | 26321343 | 26321593 | 0.348 |
| chr1 | 27450716 | 27450966 | 0.348 |
| chr1 | 28296472 | 28296722 | 0.296 |
| chr1 | 29098007 | 29098257 | 0.348 |
| chr1 | 30034947 | 30035197 | 0.348 |
| chr1 | 30884476 | 30884726 | 0.348 |
| chr1 | 31759697 | 31759947 | 0.348 |
| chr1 | 32646478 | 32646728 | 0.348 |
| chr1 | 33479257 | 33479507 | 0.348 |
| chr1 | 34305150 | 34305400 | 0.348 |
| chr1 | 35132601 | 35132851 | 0.348 |
| chr1 | 35939215 | 35939465 | 0.348 |
| chr1 | 36744730 | 36744980 | 0.336 |
| chr1 | 37623596 | 37623846 | 0.348 |
| chr1 | 38444825 | 38445075 | 0.348 |
| chr1 | 39248090 | 39248340 | 0.348 |
| chr1 | 40135959 | 40136209 | 0.348 |
| chr1 | 41158448 | 41158698 | 0.348 |
| chr1 | 42642199 | 42642449 | 0.348 |
| chr1 | 43546530 | 43546780 | 0.308 |
| chr1 | 44429847 | 44430097 | 0.348 |
| chr1 | 45307055 | 45307305 | 0.348 |
| chr1 | 46108116 | 46108366 | 0.348 |
| chr1 | 47100462 | 47100712 | 0.324 |
| chr1 | 48012499 | 48012749 | 0.348 |
| chr1 | 48821604 | 48821854 | 0.268 |
| chr1 | 49632073 | 49632323 | 0.336 |
| chr1 | 50440111 | 50440361 | 0.332 |
| chr1 | 51241903 | 51242153 | 0.312 |
| chr1 | 52076744 | 52076994 | 0.348 |
| chr1 | 53710264 | 53710514 | 0.348 |
| chr1 | 54512550 | 54512800 | 0.344 |
| chr1 | 55394792 | 55395042 | 0.348 |
| chr1 | 56384481 | 56384731 | 0.348 |
| chr1 | 57349269 | 57349519 | 0.348 |
| chr1 | 58229509 | 58229759 | 0.348 |
| chr1 | 59040876 | 59041126 | 0.348 |
| chr1 | 59858357 | 59858607 | 0.304 |
| chr1 | 60930291 | 60930541 | 0.348 |
| chr1 | 62103549 | 62103799 | 0.304 |
| chr1 | 62916429 | 62916679 | 0.348 |
| chr1 | 64067557 | 64067807 | 0.348 |
| chr1 | 64969248 | 64969498 | 0.348 |
| chr1 | 65878461 | 65878711 | 0.348 |
| chr1 | 67063532 | 67063782 | 0.336 |
| chr1 | 67873342 | 67873592 | 0.348 |
| chr1 | 70446150 | 70446400 | 0.272 |
| chr1 | 71372533 | 71372783 | 0.348 |
| chr1 | 72327150 | 72327400 | 0.348 |
| chr1 | 73213150 | 73213400 | 0.332 |
| chr1 | 74040085 | 74040335 | 0.344 |
| chr1 | 74845564 | 74845814 | 0.348 |
| chr1 | 75862550 | 75862800 | 0.316 |
| chr1 | 76678210 | 76678460 | 0.348 |
| chr1 | 77512868 | 77513118 | 0.348 |
| chr1 | 78324741 | 78324991 | 0.284 |
| chr1 | 79622150 | 79622400 | 0.324 |
| chr1 | 79622150 | 79622400 | 0.324 |
| chr1 | 81028150 | 81028400 | 0.28 |
| chr1 | 81829490 | 81829740 | 0.3 |
| chr1 | 82631657 | 82631907 | 0.344 |
| chr1 | 83432297 | 83432547 | 0.348 |
| chr1 | 84232408 | 84232658 | 0.348 |
| chr1 | 85186300 | 85186550 | 0.348 |
| chr1 | 85987798 | 85988048 | 0.312 |
| chr1 | 86792219 | 86792469 | 0.3 |
| chr1 | 88716354 | 88716604 | 0.348 |
| chr1 | 89574150 | 89574400 | 0.344 |
| chr1 | 90818292 | 90818542 | 0.348 |
| chr1 | 91937586 | 91937836 | 0.332 |
| chr1 | 92757305 | 92757555 | 0.32 |
| chr1 | 93564210 | 93564460 | 0.328 |
| chr1 | 94366822 | 94367072 | 0.348 |
| chr1 | 94473766 | 94474015 | 0.53012 |
| chr1 | 94476259 | 94476508 | 0.566265 |
| chr1 | 94496446 | 94496695 | 0.546185 |
| chr1 | 94508204 | 94508453 | 0.554217 |
| chr1 | 94508724 | 94508973 | 0.570281 |
| chr1 | 94517145 | 94517394 | 0.369478 |
| chr1 | 94525991 | 94526240 | 0.477912 |
| chr1 | 95460410 | 95460660 | 0.336 |
| chr1 | 96550309 | 96550559 | 0.348 |
| chr1 | 97375580 | 97375830 | 0.348 |
| chr1 | 98175941 | 98176191 | 0.256 |
| chr1 | 99069150 | 99069400 | 0.3 |
| chr1 | 99919444 | 99919694 | 0.34 |
| chr1 | 100316484 | 100316734 | 0.34 |
| chr1 | 100316495 | 100316745 | 0.348 |
| chr1 | 100340820 | 100341070 | 0.344 |
| chr1 | 100346760 | 100347010 | 0.38 |
| chr1 | 100381830 | 100382080 | 0.28 |
| chr1 | 100381939 | 100382189 | 0.292 |
| chr1 | 100382143 | 100382393 | 0.356 |
| chr1 | 100881150 | 100881400 | 0.272 |
| chr1 | 101683272 | 101683522 | 0.348 |
| chr1 | 102490150 | 102490400 | 0.292 |
| chr1 | 103317424 | 103317674 | 0.348 |
| chr1 | 104122384 | 104122634 | 0.344 |
| chr1 | 104943912 | 104944162 | 0.328 |
| chr1 | 105852554 | 105852804 | 0.328 |
| chr1 | 107171238 | 107171488 | 0.32 |
| chr1 | 108028411 | 108028661 | 0.348 |
| chr1 | 108856564 | 108856814 | 0.288 |
| chr1 | 109676087 | 109676337 | 0.348 |
| chr1 | 110522602 | 110522852 | 0.348 |
| chr1 | 111340253 | 111340503 | 0.34 |
| chr1 | 112949435 | 112949685 | 0.332 |
| chr1 | 113770383 | 113770633 | 0.332 |
| chr1 | 114637753 | 114638003 | 0.348 |
| chr1 | 115437771 | 115438021 | 0.3 |
| chr1 | 116573150 | 116573400 | 0.32 |
| chr1 | 117560545 | 117560795 | 0.348 |
| chr1 | 118572363 | 118572613 | 0.308 |
| chr1 | 119423232 | 119423482 | 0.332 |
| chr1 | 119957941 | 119958191 | 0.512 |
| chr1 | 119964669 | 119964919 | 0.508 |
| chr1 | 120230467 | 120230717 | 0.348 |
| chr1 | 120269395 | 120269645 | 0.58 |
| chr1 | 120277828 | 120278078 | 0.612 |
| chr1 | 120277930 | 120278180 | 0.604 |
| chr1 | 120284326 | 120284576 | 0.58 |
| chr1 | 120285389 | 120285639 | 0.636 |
| chr1 | 120286404 | 120286654 | 0.556 |
| chr1 | 144917078 | 144917328 | 0.312 |
| chr1 | 145416495 | 145416745 | 0.54 |
| chr1 | 145732849 | 145733099 | 0.348 |
| chr1 | 147385212 | 147385462 | 0.344 |
| chr1 | 149912055 | 149912305 | 0.348 |
| chr1 | 150722611 | 150722861 | 0.348 |
| chr1 | 151586322 | 151586572 | 0.348 |
| chr1 | 152399440 | 152399690 | 0.344 |
| chr1 | 153275352 | 153275602 | 0.348 |
| chr1 | 154245900 | 154246150 | 0.536 |
| chr1 | 154247516 | 154247766 | 0.464 |
| chr1 | 154812453 | 154812703 | 0.348 |
| chr1 | 155204665 | 155204914 | 0.562249 |
| chr1 | 155204957 | 155205206 | 0.574297 |
| chr1 | 155205406 | 155205571 | 0.521212 |
| chr1 | 155205538 | 155205717 | 0.564246 |
| chr1 | 155210424 | 155210673 | 0.562249 |
| chr1 | 155691410 | 155691660 | 0.348 |
| chr1 | 156691635 | 156691885 | 0.304 |
| chr1 | 157494327 | 157494577 | 0.348 |
| chr1 | 158381408 | 158381658 | 0.348 |
| chr1 | 159416150 | 159416400 | 0.348 |
| chr1 | 161320957 | 161321207 | 0.348 |
| chr1 | 162192273 | 162192523 | 0.348 |
| chr1 | 162995450 | 162995700 | 0.324 |
| chr1 | 163811190 | 163811440 | 0.348 |
| chr1 | 164673253 | 164673503 | 0.348 |
| chr1 | 165475943 | 165476193 | 0.348 |
| chr1 | 166300688 | 166300938 | 0.336 |
| chr1 | 167123296 | 167123546 | 0.336 |
| chr1 | 169063150 | 169063400 | 0.324 |
| chr1 | 170055150 | 170055400 | 0.328 |
| chr1 | 170920233 | 170920483 | 0.328 |
| chr1 | 171773161 | 171773411 | 0.348 |
| chr1 | 172673411 | 172673661 | 0.348 |
| chr1 | 173542401 | 173542651 | 0.288 |
| chr1 | 174517204 | 174517454 | 0.348 |
| chr1 | 175778380 | 175778630 | 0.332 |
| chr1 | 176580310 | 176580560 | 0.348 |
| chr1 | 177395900 | 177396150 | 0.348 |
| chr1 | 178513548 | 178513798 | 0.324 |
| chr1 | 179452150 | 179452400 | 0.344 |
| chr1 | 179521616 | 179521866 | 0.532 |
| chr1 | 179521631 | 179521881 | 0.52 |
| chr1 | 179526237 | 179526487 | 0.42 |
| chr1 | 179530337 | 179530587 | 0.376 |
| chr1 | 179544561 | 179544811 | 0.596 |
| chr1 | 180255735 | 180255985 | 0.316 |
| chr1 | 181056840 | 181057090 | 0.348 |
| chr1 | 182634465 | 182634715 | 0.348 |
| chr1 | 183811332 | 183811582 | 0.348 |
| chr1 | 184719150 | 184719400 | 0.308 |
| chr1 | 185737150 | 185737400 | 0.344 |
| chr1 | 186544294 | 186544544 | 0.336 |
| chr1 | 187345956 | 187346206 | 0.348 |
| chr1 | 188148703 | 188148953 | 0.328 |
| chr1 | 188964150 | 188964400 | 0.3 |
| chr1 | 189860180 | 189860430 | 0.312 |
| chr1 | 191057168 | 191057418 | 0.348 |
| chr1 | 191860751 | 191861001 | 0.344 |
| chr1 | 192733150 | 192733400 | 0.348 |
| chr1 | 193629150 | 193629400 | 0.268 |
| chr1 | 194870567 | 194870817 | 0.272 |
| chr1 | 195678176 | 195678426 | 0.348 |
| chr1 | 196491241 | 196491491 | 0.308 |
| chr1 | 197292396 | 197292646 | 0.312 |
| chr1 | 198093741 | 198093991 | 0.288 |
| chr1 | 199102394 | 199102644 | 0.32 |
| chr1 | 199910959 | 199911209 | 0.348 |
| chr1 | 200726178 | 200726428 | 0.336 |
| chr1 | 201594767 | 201595017 | 0.348 |
| chr1 | 202763399 | 202763649 | 0.348 |
| chr1 | 203583274 | 203583524 | 0.344 |
| chr1 | 204505599 | 204505849 | 0.348 |
| chr1 | 205323323 | 205323573 | 0.348 |
| chr1 | 206199203 | 206199453 | 0.348 |
| chr1 | 207040001 | 207040251 | 0.348 |
| chr1 | 208628219 | 208628469 | 0.348 |
| chr1 | 209429745 | 209429995 | 0.348 |
| chr1 | 211050331 | 211050581 | 0.348 |
| chr1 | 211854312 | 211854562 | 0.308 |
| chr1 | 212715103 | 212715353 | 0.332 |
| chr1 | 213681370 | 213681620 | 0.348 |
| chr1 | 214976150 | 214976400 | 0.32 |
| chr1 | 215844302 | 215844552 | 0.416 |
| chr1 | 215853595 | 215853845 | 0.416 |
| chr1 | 215992471 | 215992721 | 0.328 |
| chr1 | 216420312 | 216420562 | 0.46 |
| chr1 | 216420402 | 216420652 | 0.4 |
| chr1 | 216497437 | 216497687 | 0.328 |
| chr1 | 216792844 | 216793094 | 0.348 |
| chr1 | 217599535 | 217599785 | 0.276 |
| chr1 | 219297150 | 219297400 | 0.32 |
| chr1 | 220100279 | 220100529 | 0.348 |
| chr1 | 220903327 | 220903577 | 0.348 |
| chr1 | 222029233 | 222029483 | 0.348 |
| chr1 | 222831067 | 222831317 | 0.304 |
| chr1 | 223637903 | 223638153 | 0.348 |
| chr1 | 224462520 | 224462770 | 0.324 |
| chr1 | 225395150 | 225395400 | 0.328 |
| chr1 | 226223152 | 226223402 | 0.348 |
| chr1 | 227178529 | 227178779 | 0.348 |
| chr1 | 228644123 | 228644373 | 0.348 |
| chr1 | 229446849 | 229447099 | 0.348 |
| chr1 | 230259328 | 230259578 | 0.328 |
| chr1 | 231872599 | 231872849 | 0.332 |
| chr1 | 232812441 | 232812691 | 0.328 |
| chr1 | 233881150 | 233881400 | 0.296 |
| chr1 | 234687934 | 234688184 | 0.312 |
| chr1 | 235489202 | 235489452 | 0.324 |
| chr1 | 236335526 | 236335776 | 0.348 |
| chr1 | 237165928 | 237166178 | 0.348 |
| chr1 | 238564150 | 238564400 | 0.308 |
| chr1 | 239364391 | 239364641 | 0.3 |
| chr1 | 240522579 | 240522829 | 0.344 |
| chr1 | 242534150 | 242534400 | 0.328 |
| chr1 | 243386411 | 243386661 | 0.332 |
| chr1 | 244192638 | 244192888 | 0.348 |
| chr1 | 245000355 | 245000605 | 0.348 |
| chr1 | 245854798 | 245855048 | 0.348 |
| chr1 | 246660293 | 246660543 | 0.316 |
| chr1 | 247618340 | 247618590 | 0.348 |
| chr1 | 248428706 | 248428956 | 0.308 |
| chr2 | 65470 | 65720 | 0.348 |
| chr2 | 887693 | 887943 | 0.32 |
| chr2 | 1696872 | 1697122 | 0.348 |
| chr2 | 2498456 | 2498706 | 0.304 |
| chr2 | 3336432 | 3336682 | 0.348 |
| chr2 | 4140186 | 4140436 | 0.348 |
| chr2 | 4957104 | 4957354 | 0.348 |
| chr2 | 6772150 | 6772400 | 0.34 |
| chr2 | 7580936 | 7581186 | 0.348 |
| chr2 | 8382165 | 8382415 | 0.348 |
| chr2 | 9193965 | 9194215 | 0.348 |
| chr2 | 10008838 | 10009088 | 0.304 |
| chr2 | 10811702 | 10811952 | 0.34 |
| chr2 | 11639024 | 11639274 | 0.348 |
| chr2 | 12448608 | 12448858 | 0.336 |
| chr2 | 13475150 | 13475400 | 0.34 |
| chr2 | 14298194 | 14298444 | 0.348 |
| chr2 | 15098693 | 15098943 | 0.348 |
| chr2 | 15948834 | 15949084 | 0.344 |
| chr2 | 16749787 | 16750037 | 0.348 |
| chr2 | 17563803 | 17564053 | 0.288 |
| chr2 | 18584239 | 18584489 | 0.348 |
| chr2 | 19417426 | 19417676 | 0.348 |
| chr2 | 20234783 | 20235033 | 0.348 |
| chr2 | 21034816 | 21035066 | 0.348 |
| chr2 | 21841601 | 21841851 | 0.328 |
| chr2 | 22644838 | 22645088 | 0.348 |
| chr2 | 23466443 | 23466693 | 0.348 |
| chr2 | 24289207 | 24289457 | 0.332 |
| chr2 | 25100859 | 25101109 | 0.348 |
| chr2 | 25957531 | 25957781 | 0.348 |
| chr2 | 26782767 | 26783017 | 0.348 |
| chr2 | 27595658 | 27595908 | 0.348 |
| chr2 | 28407842 | 28408092 | 0.316 |
| chr2 | 29274893 | 29275143 | 0.348 |
| chr2 | 30090065 | 30090315 | 0.348 |
| chr2 | 30952180 | 30952430 | 0.348 |
| chr2 | 31755042 | 31755292 | 0.348 |
| chr2 | 32583549 | 32583799 | 0.348 |
| chr2 | 33391150 | 33391400 | 0.276 |
| chr2 | 34383150 | 34383400 | 0.348 |
| chr2 | 35195332 | 35195582 | 0.344 |
| chr2 | 36137213 | 36137463 | 0.348 |
| chr2 | 36943435 | 36943685 | 0.348 |
| chr2 | 37916535 | 37916785 | 0.348 |
| chr2 | 38718989 | 38719239 | 0.348 |
| chr2 | 39520447 | 39520697 | 0.252 |
| chr2 | 40715152 | 40715402 | 0.348 |
| chr2 | 41775150 | 41775400 | 0.336 |
| chr2 | 42935152 | 42935402 | 0.348 |
| chr2 | 43736701 | 43736951 | 0.288 |
| chr2 | 44201259 | 44201509 | 0.356 |
| chr2 | 45388418 | 45388668 | 0.34 |
| chr2 | 46218740 | 46218990 | 0.348 |
| chr2 | 47124807 | 47125057 | 0.328 |
| chr2 | 48209532 | 48209782 | 0.348 |
| chr2 | 49436565 | 49436815 | 0.348 |
| chr2 | 50262150 | 50262400 | 0.312 |
| chr2 | 51067246 | 51067496 | 0.304 |
| chr2 | 51923177 | 51923427 | 0.348 |
| chr2 | 52934234 | 52934484 | 0.348 |
| chr2 | 53762231 | 53762481 | 0.348 |
| chr2 | 54564438 | 54564688 | 0.348 |
| chr2 | 55380451 | 55380701 | 0.348 |
| chr2 | 56181574 | 56181824 | 0.348 |
| chr2 | 57163150 | 57163400 | 0.316 |
| chr2 | 58358268 | 58358518 | 0.34 |
| chr2 | 59360150 | 59360400 | 0.328 |
| chr2 | 60236150 | 60236400 | 0.34 |
| chr2 | 61078467 | 61078717 | 0.348 |
| chr2 | 61898047 | 61898297 | 0.348 |
| chr2 | 63027252 | 63027502 | 0.348 |
| chr2 | 64476343 | 64476593 | 0.348 |
| chr2 | 65539531 | 65539781 | 0.348 |
| chr2 | 66468258 | 66468508 | 0.348 |
| chr2 | 67310247 | 67310497 | 0.348 |
| chr2 | 68121736 | 68121986 | 0.348 |
| chr2 | 68937150 | 68937400 | 0.324 |
| chr2 | 69754384 | 69754634 | 0.348 |
| chr2 | 70609376 | 70609626 | 0.348 |
| chr2 | 71418299 | 71418549 | 0.348 |
| chr2 | 72388795 | 72389045 | 0.348 |
| chr2 | 73673243 | 73673493 | 0.348 |
| chr2 | 74477048 | 74477298 | 0.348 |
| chr2 | 75293899 | 75294149 | 0.348 |
| chr2 | 76188150 | 76188400 | 0.348 |
| chr2 | 77065379 | 77065629 | 0.288 |
| chr2 | 77963477 | 77963727 | 0.292 |
| chr2 | 79082465 | 79082715 | 0.316 |
| chr2 | 79883120 | 79883370 | 0.324 |
| chr2 | 80684819 | 80685069 | 0.348 |
| chr2 | 81668320 | 81668570 | 0.348 |
| chr2 | 82672150 | 82672400 | 0.316 |
| chr2 | 83483150 | 83483400 | 0.344 |
| chr2 | 84462272 | 84462522 | 0.348 |
| chr2 | 85281169 | 85281419 | 0.348 |
| chr2 | 86625495 | 86625745 | 0.32 |
| chr2 | 88326662 | 88326912 | 0.28 |
| chr2 | 89132432 | 89132682 | 0.348 |
| chr2 | 90105696 | 90105946 | 0.328 |
| chr2 | 95627799 | 95628049 | 0.284 |
| chr2 | 96845176 | 96845426 | 0.348 |
| chr2 | 97651219 | 97651469 | 0.348 |
| chr2 | 98452233 | 98452483 | 0.348 |
| chr2 | 99255916 | 99256166 | 0.332 |
| chr2 | 100057041 | 100057291 | 0.348 |
| chr2 | 100890150 | 100890400 | 0.3 |
| chr2 | 102415179 | 102415429 | 0.316 |
| chr2 | 103622548 | 103622798 | 0.348 |
| chr2 | 104670507 | 104670757 | 0.348 |
| chr2 | 105567150 | 105567400 | 0.332 |
| chr2 | 106412373 | 106412623 | 0.336 |
| chr2 | 107768153 | 107768403 | 0.348 |
| chr2 | 108612236 | 108612486 | 0.284 |
| chr2 | 109664556 | 109664806 | 0.316 |
| chr2 | 110464569 | 110464819 | 0.348 |
| chr2 | 111395348 | 111395598 | 0.3 |
| chr2 | 112278329 | 112278579 | 0.348 |
| chr2 | 113583150 | 113583400 | 0.304 |
| chr2 | 114468912 | 114469162 | 0.264 |
| chr2 | 115268995 | 115269245 | 0.348 |
| chr2 | 116107157 | 116107407 | 0.328 |
| chr2 | 117369331 | 117369581 | 0.344 |
| chr2 | 118244266 | 118244516 | 0.316 |
| chr2 | 119059803 | 119060053 | 0.348 |
| chr2 | 119900354 | 119900604 | 0.348 |
| chr2 | 121044398 | 121044648 | 0.304 |
| chr2 | 122113389 | 122113639 | 0.348 |
| chr2 | 122919222 | 122919472 | 0.348 |
| chr2 | 123777443 | 123777693 | 0.348 |
| chr2 | 124919150 | 124919400 | 0.332 |
| chr2 | 126026342 | 126026592 | 0.292 |
| chr2 | 126917504 | 126917754 | 0.344 |
| chr2 | 128045375 | 128045625 | 0.336 |
| chr2 | 129682980 | 129683230 | 0.252 |
| chr2 | 130487549 | 130487799 | 0.348 |
| chr2 | 131534801 | 131535051 | 0.34 |
| chr2 | 133127584 | 133127834 | 0.348 |
| chr2 | 134661154 | 134661404 | 0.348 |
| chr2 | 135922383 | 135922633 | 0.348 |
| chr2 | 136723496 | 136723746 | 0.348 |
| chr2 | 137528425 | 137528675 | 0.344 |
| chr2 | 138373550 | 138373800 | 0.34 |
| chr2 | 139318150 | 139318400 | 0.288 |
| chr2 | 140527261 | 140527511 | 0.348 |
| chr2 | 141332198 | 141332448 | 0.312 |
| chr2 | 142149579 | 142149829 | 0.348 |
| chr2 | 142949600 | 142949850 | 0.268 |
| chr2 | 144077240 | 144077490 | 0.328 |
| chr2 | 144964208 | 144964458 | 0.348 |
| chr2 | 145817150 | 145817400 | 0.332 |
| chr2 | 146618150 | 146618400 | 0.312 |
| chr2 | 147969538 | 147969788 | 0.348 |
| chr2 | 149217150 | 149217400 | 0.304 |
| chr2 | 150017703 | 150017953 | 0.348 |
| chr2 | 150828995 | 150829245 | 0.336 |
| chr2 | 151767165 | 151767415 | 0.348 |
| chr2 | 152568463 | 152568713 | 0.348 |
| chr2 | 153683234 | 153683484 | 0.3 |
| chr2 | 154938150 | 154938400 | 0.348 |
| chr2 | 156008150 | 156008400 | 0.32 |
| chr2 | 156870242 | 156870492 | 0.348 |
| chr2 | 158163167 | 158163417 | 0.348 |
| chr2 | 159077150 | 159077400 | 0.288 |
| chr2 | 159891571 | 159891821 | 0.348 |
| chr2 | 161025175 | 161025425 | 0.348 |
| chr2 | 161831540 | 161831790 | 0.348 |
| chr2 | 162632193 | 162632443 | 0.316 |
| chr2 | 163715424 | 163715674 | 0.3 |
| chr2 | 165052569 | 165052819 | 0.348 |
| chr2 | 166288165 | 166288415 | 0.348 |
| chr2 | 167465150 | 167465400 | 0.296 |
| chr2 | 168517553 | 168517803 | 0.348 |
| chr2 | 169362170 | 169362420 | 0.348 |
| chr2 | 169780201 | 169780451 | 0.5 |
| chr2 | 169826516 | 169826766 | 0.484 |
| chr2 | 169832981 | 169833231 | 0.404 |
| chr2 | 169847204 | 169847454 | 0.444 |
| chr2 | 170163218 | 170163468 | 0.288 |
| chr2 | 171000920 | 171001170 | 0.348 |
| chr2 | 171805339 | 171805589 | 0.308 |
| chr2 | 172606368 | 172606618 | 0.3 |
| chr2 | 173421849 | 173422099 | 0.348 |
| chr2 | 174223616 | 174223866 | 0.348 |
| chr2 | 175024289 | 175024539 | 0.252 |
| chr2 | 176231150 | 176231400 | 0.328 |
| chr2 | 177265150 | 177265400 | 0.304 |
| chr2 | 178168408 | 178168658 | 0.348 |
| chr2 | 178969134 | 178969384 | 0.348 |
| chr2 | 179769150 | 179769400 | 0.344 |
| chr2 | 181084474 | 181084724 | 0.348 |
| chr2 | 181981239 | 181981489 | 0.348 |
| chr2 | 182819465 | 182819715 | 0.348 |
| chr2 | 183718150 | 183718400 | 0.3 |
| chr2 | 184593423 | 184593673 | 0.292 |
| chr2 | 185397270 | 185397520 | 0.316 |
| chr2 | 186197382 | 186197632 | 0.28 |
| chr2 | 187064150 | 187064400 | 0.284 |
| chr2 | 187967150 | 187967400 | 0.348 |
| chr2 | 188804233 | 188804483 | 0.32 |
| chr2 | 189831150 | 189831400 | 0.348 |
| chr2 | 190812502 | 190812752 | 0.328 |
| chr2 | 191629581 | 191629831 | 0.348 |
| chr2 | 192431709 | 192431959 | 0.348 |
| chr2 | 193235999 | 193236249 | 0.348 |
| chr2 | 194633277 | 194633527 | 0.3 |
| chr2 | 195731550 | 195731800 | 0.344 |
| chr2 | 196720594 | 196720844 | 0.348 |
| chr2 | 198035335 | 198035585 | 0.344 |
| chr2 | 198852416 | 198852666 | 0.308 |
| chr2 | 199715449 | 199715699 | 0.348 |
| chr2 | 200878150 | 200878400 | 0.272 |
| chr2 | 202016150 | 202016400 | 0.34 |
| chr2 | 202966480 | 202966730 | 0.348 |
| chr2 | 203783437 | 203783687 | 0.284 |
| chr2 | 204585253 | 204585503 | 0.348 |
| chr2 | 205421450 | 205421700 | 0.332 |
| chr2 | 206266431 | 206266681 | 0.348 |
| chr2 | 207571598 | 207571848 | 0.348 |
| chr2 | 208734150 | 208734400 | 0.34 |
| chr2 | 209711150 | 209711400 | 0.32 |
| chr2 | 210732509 | 210732759 | 0.328 |
| chr2 | 211568334 | 211568584 | 0.348 |
| chr2 | 212713453 | 212713703 | 0.348 |
| chr2 | 213773225 | 213773475 | 0.332 |
| chr2 | 214848150 | 214848400 | 0.296 |
| chr2 | 216079487 | 216079737 | 0.348 |
| chr2 | 216891573 | 216891823 | 0.304 |
| chr2 | 217729569 | 217729819 | 0.348 |
| chr2 | 218601613 | 218601863 | 0.344 |
| chr2 | 219412476 | 219412726 | 0.348 |
| chr2 | 219525688 | 219525938 | 0.576 |
| chr2 | 219525751 | 219526001 | 0.58 |
| chr2 | 219525833 | 219526083 | 0.532 |
| chr2 | 219525881 | 219526131 | 0.504 |
| chr2 | 219526345 | 219526595 | 0.548 |
| chr2 | 219526444 | 219526694 | 0.536 |
| chr2 | 219526446 | 219526696 | 0.536 |
| chr2 | 219527213 | 219527463 | 0.588 |
| chr2 | 219527776 | 219528026 | 0.572 |
| chr2 | 219676946 | 219677196 | 0.568 |
| chr2 | 219677019 | 219677269 | 0.552 |
| chr2 | 219677317 | 219677567 | 0.572 |
| chr2 | 219677348 | 219677598 | 0.564 |
| chr2 | 219677704 | 219677954 | 0.592 |
| chr2 | 219679007 | 219679257 | 0.54 |
| chr2 | 219679057 | 219679307 | 0.536 |
| chr2 | 219679259 | 219679509 | 0.604 |
| chr2 | 219679350 | 219679600 | 0.628 |
| chr2 | 220712330 | 220712580 | 0.348 |
| chr2 | 221621220 | 221621470 | 0.348 |
| chr2 | 222580464 | 222580714 | 0.348 |
| chr2 | 223398818 | 223399068 | 0.348 |
| chr2 | 224206872 | 224207122 | 0.32 |
| chr2 | 225175548 | 225175798 | 0.348 |
| chr2 | 226463150 | 226463400 | 0.3 |
| chr2 | 227271729 | 227271979 | 0.316 |
| chr2 | 227872066 | 227872316 | 0.536 |
| chr2 | 227872698 | 227872948 | 0.632 |
| chr2 | 227896640 | 227896890 | 0.508 |
| chr2 | 227896844 | 227897094 | 0.516 |
| chr2 | 228173604 | 228173854 | 0.42 |
| chr2 | 228720266 | 228720516 | 0.348 |
| chr2 | 229615501 | 229615751 | 0.324 |
| chr2 | 230420658 | 230420908 | 0.288 |
| chr2 | 232026193 | 232026443 | 0.348 |
| chr2 | 232832077 | 232832327 | 0.348 |
| chr2 | 233404678 | 233404928 | 0.64 |
| chr2 | 233405261 | 233405511 | 0.632 |
| chr2 | 233407577 | 233407827 | 0.612 |
| chr2 | 233722288 | 233722538 | 0.348 |
| chr2 | 234669321 | 234669571 | 0.552 |
| chr2 | 234669649 | 234669899 | 0.44 |
| chr2 | 234675613 | 234675863 | 0.372 |
| chr2 | 234676780 | 234677030 | 0.484 |
| chr2 | 235489755 | 235490005 | 0.348 |
| chr2 | 236310414 | 236310664 | 0.348 |
| chr2 | 237286150 | 237286400 | 0.312 |
| chr2 | 238626336 | 238626586 | 0.348 |
| chr2 | 239657398 | 239657648 | 0.328 |
| chr2 | 240490228 | 240490478 | 0.348 |
| chr2 | 241499243 | 241499493 | 0.348 |
| chr2 | 241808489 | 241808739 | 0.62 |
| chr2 | 241808572 | 241808822 | 0.62 |
| chr2 | 242312643 | 242312893 | 0.348 |
| chr3 | 106582 | 106832 | 0.348 |
| chr3 | 908384 | 908634 | 0.312 |
| chr3 | 1765150 | 1765400 | 0.312 |
| chr3 | 2567150 | 2567400 | 0.304 |
| chr3 | 3462150 | 3462400 | 0.316 |
| chr3 | 4337222 | 4337472 | 0.348 |
| chr3 | 5258275 | 5258525 | 0.348 |
| chr3 | 6270433 | 6270683 | 0.348 |
| chr3 | 7086564 | 7086814 | 0.348 |
| chr3 | 8132516 | 8132766 | 0.336 |
| chr3 | 8945155 | 8945405 | 0.348 |
| chr3 | 10011145 | 10011395 | 0.344 |
| chr3 | 10874086 | 10874336 | 0.348 |
| chr3 | 11859185 | 11859435 | 0.348 |
| chr3 | 12659562 | 12659812 | 0.308 |
| chr3 | 13508599 | 13508849 | 0.348 |
| chr3 | 14357844 | 14358094 | 0.348 |
| chr3 | 15686845 | 15687095 | 0.544 |
| chr3 | 15718550 | 15718800 | 0.34 |
| chr3 | 16857172 | 16857422 | 0.348 |
| chr3 | 18013150 | 18013400 | 0.328 |
| chr3 | 18993185 | 18993435 | 0.348 |
| chr3 | 19802245 | 19802495 | 0.336 |
| chr3 | 20604117 | 20604367 | 0.348 |
| chr3 | 21451150 | 21451400 | 0.324 |
| chr3 | 22286462 | 22286712 | 0.348 |
| chr3 | 23158341 | 23158591 | 0.348 |
| chr3 | 24158297 | 24158547 | 0.348 |
| chr3 | 25277173 | 25277423 | 0.348 |
| chr3 | 26446293 | 26446543 | 0.328 |
| chr3 | 27249004 | 27249254 | 0.324 |
| chr3 | 28051902 | 28052152 | 0.348 |
| chr3 | 28868402 | 28868652 | 0.348 |
| chr3 | 29670992 | 29671242 | 0.32 |
| chr3 | 30519197 | 30519447 | 0.348 |
| chr3 | 31364183 | 31364433 | 0.348 |
| chr3 | 32524425 | 32524675 | 0.348 |
| chr3 | 33428371 | 33428621 | 0.348 |
| chr3 | 34284461 | 34284711 | 0.348 |
| chr3 | 35362150 | 35362400 | 0.34 |
| chr3 | 36162197 | 36162447 | 0.348 |
| chr3 | 36969914 | 36970164 | 0.348 |
| chr3 | 37806754 | 37807004 | 0.348 |
| chr3 | 38725451 | 38725701 | 0.348 |
| chr3 | 39545431 | 39545681 | 0.348 |
| chr3 | 40346322 | 40346572 | 0.32 |
| chr3 | 41182781 | 41183031 | 0.348 |
| chr3 | 42062642 | 42062892 | 0.348 |
| chr3 | 42870181 | 42870431 | 0.348 |
| chr3 | 43679165 | 43679415 | 0.348 |
| chr3 | 44511929 | 44512179 | 0.332 |
| chr3 | 45335638 | 45335888 | 0.336 |
| chr3 | 46151421 | 46151671 | 0.348 |
| chr3 | 47066811 | 47067061 | 0.348 |
| chr3 | 47901166 | 47901416 | 0.348 |
| chr3 | 48730727 | 48730977 | 0.348 |
| chr3 | 49570998 | 49571248 | 0.348 |
| chr3 | 50643833 | 50644083 | 0.348 |
| chr3 | 51451458 | 51451708 | 0.348 |
| chr3 | 52301455 | 52301705 | 0.348 |
| chr3 | 53125457 | 53125707 | 0.332 |
| chr3 | 53930140 | 53930390 | 0.308 |
| chr3 | 54731843 | 54732093 | 0.348 |
| chr3 | 55552366 | 55552616 | 0.348 |
| chr3 | 56374796 | 56375046 | 0.344 |
| chr3 | 57175379 | 57175629 | 0.268 |
| chr3 | 58002540 | 58002790 | 0.32 |
| chr3 | 58914444 | 58914694 | 0.316 |
| chr3 | 60826550 | 60826800 | 0.28 |
| chr3 | 62217159 | 62217409 | 0.348 |
| chr3 | 63145150 | 63145400 | 0.344 |
| chr3 | 64458150 | 64458400 | 0.348 |
| chr3 | 65372154 | 65372404 | 0.348 |
| chr3 | 66316150 | 66316400 | 0.348 |
| chr3 | 67172150 | 67172400 | 0.324 |
| chr3 | 67972470 | 67972720 | 0.304 |
| chr3 | 68775683 | 68775933 | 0.348 |
| chr3 | 69819562 | 69819812 | 0.348 |
| chr3 | 70622150 | 70622400 | 0.256 |
| chr3 | 71422272 | 71422522 | 0.348 |
| chr3 | 72235107 | 72235357 | 0.336 |
| chr3 | 73035206 | 73035456 | 0.348 |
| chr3 | 73959481 | 73959731 | 0.348 |
| chr3 | 74759920 | 74760170 | 0.252 |
| chr3 | 75954621 | 75954871 | 0.284 |
| chr3 | 76763596 | 76763846 | 0.348 |
| chr3 | 77570832 | 77571082 | 0.344 |
| chr3 | 78386873 | 78387123 | 0.348 |
| chr3 | 79188557 | 79188807 | 0.348 |
| chr3 | 80261571 | 80261821 | 0.348 |
| chr3 | 81419171 | 81419421 | 0.348 |
| chr3 | 81697870 | 81698120 | 0.304 |
| chr3 | 82375279 | 82375529 | 0.348 |
| chr3 | 83179213 | 83179463 | 0.316 |
| chr3 | 83997183 | 83997433 | 0.292 |
| chr3 | 84798234 | 84798484 | 0.312 |
| chr3 | 85600581 | 85600831 | 0.328 |
| chr3 | 86406853 | 86407103 | 0.296 |
| chr3 | 87309262 | 87309512 | 0.348 |
| chr3 | 88400150 | 88400400 | 0.3 |
| chr3 | 89682150 | 89682400 | 0.3 |
| chr3 | 93653233 | 93653483 | 0.336 |
| chr3 | 94486575 | 94486825 | 0.344 |
| chr3 | 95493267 | 95493517 | 0.312 |
| chr3 | 96311242 | 96311492 | 0.276 |
| chr3 | 97326150 | 97326400 | 0.276 |
| chr3 | 98164597 | 98164847 | 0.288 |
| chr3 | 98967593 | 98967843 | 0.348 |
| chr3 | 99767959 | 99768209 | 0.34 |
| chr3 | 100568517 | 100568767 | 0.332 |
| chr3 | 102171151 | 102171401 | 0.332 |
| chr3 | 104463150 | 104463400 | 0.344 |
| chr3 | 105267545 | 105267795 | 0.348 |
| chr3 | 106008363 | 106008613 | 0.276 |
| chr3 | 106219344 | 106219594 | 0.332 |
| chr3 | 107172470 | 107172720 | 0.348 |
| chr3 | 108216183 | 108216433 | 0.304 |
| chr3 | 109044868 | 109045118 | 0.348 |
| chr3 | 110072469 | 110072719 | 0.348 |
| chr3 | 110913541 | 110913791 | 0.348 |
| chr3 | 111996421 | 111996671 | 0.348 |
| chr3 | 113052335 | 113052585 | 0.348 |
| chr3 | 113880193 | 113880443 | 0.348 |
| chr3 | 115100591 | 115100841 | 0.348 |
| chr3 | 116316282 | 116316532 | 0.348 |
| chr3 | 117419150 | 117419400 | 0.34 |
| chr3 | 118228268 | 118228518 | 0.348 |
| chr3 | 119031004 | 119031254 | 0.348 |
| chr3 | 119848682 | 119848932 | 0.348 |
| chr3 | 120369570 | 120369820 | 0.508 |
| chr3 | 120393624 | 120393874 | 0.488 |
| chr3 | 120394586 | 120394836 | 0.408 |
| chr3 | 121124509 | 121124759 | 0.288 |
| chr3 | 121967180 | 121967430 | 0.348 |
| chr3 | 123211159 | 123211409 | 0.348 |
| chr3 | 124011977 | 124012227 | 0.316 |
| chr3 | 124820334 | 124820584 | 0.284 |
| chr3 | 125753018 | 125753268 | 0.336 |
| chr3 | 126599445 | 126599695 | 0.348 |
| chr3 | 127455014 | 127455264 | 0.348 |
| chr3 | 129170444 | 129170694 | 0.348 |
| chr3 | 131092150 | 131092400 | 0.336 |
| chr3 | 132208201 | 132208451 | 0.328 |
| chr3 | 133852268 | 133852518 | 0.348 |
| chr3 | 135245150 | 135245400 | 0.336 |
| chr3 | 135975298 | 135975548 | 0.396 |
| chr3 | 135980686 | 135980936 | 0.432 |
| chr3 | 135980741 | 135980991 | 0.456 |
| chr3 | 136009682 | 136009932 | 0.332 |
| chr3 | 136045901 | 136046151 | 0.536 |
| chr3 | 136045956 | 136046206 | 0.536 |
| chr3 | 136046361 | 136046611 | 0.504 |
| chr3 | 136048668 | 136048918 | 0.476 |
| chr3 | 136048719 | 136048969 | 0.444 |
| chr3 | 136271150 | 136271400 | 0.272 |
| chr3 | 137101096 | 137101346 | 0.348 |
| chr3 | 138709161 | 138709411 | 0.348 |
| chr3 | 139558134 | 139558384 | 0.348 |
| chr3 | 140396238 | 140396488 | 0.348 |
| chr3 | 141198475 | 141198725 | 0.296 |
| chr3 | 142016082 | 142016332 | 0.348 |
| chr3 | 143067286 | 143067536 | 0.316 |
| chr3 | 143869968 | 143870218 | 0.348 |
| chr3 | 144671028 | 144671278 | 0.308 |
| chr3 | 145486925 | 145487175 | 0.3 |
| chr3 | 146287344 | 146287594 | 0.348 |
| chr3 | 147094525 | 147094775 | 0.348 |
| chr3 | 147896273 | 147896523 | 0.336 |
| chr3 | 148857589 | 148857839 | 0.336 |
| chr3 | 148881618 | 148881868 | 0.312 |
| chr3 | 149900583 | 149900833 | 0.348 |
| chr3 | 150645769 | 150646019 | 0.38 |
| chr3 | 150645848 | 150646098 | 0.404 |
| chr3 | 150690222 | 150690472 | 0.532 |
| chr3 | 150859582 | 150859832 | 0.348 |
| chr3 | 151668293 | 151668543 | 0.304 |
| chr3 | 152474698 | 152474948 | 0.344 |
| chr3 | 153432150 | 153432400 | 0.316 |
| chr3 | 154235025 | 154235275 | 0.344 |
| chr3 | 155041150 | 155041400 | 0.328 |
| chr3 | 155924313 | 155924563 | 0.348 |
| chr3 | 157018150 | 157018400 | 0.32 |
| chr3 | 158109466 | 158109716 | 0.348 |
| chr3 | 159249551 | 159249801 | 0.332 |
| chr3 | 160003430 | 160003680 | 0.296 |
| chr3 | 160316406 | 160316656 | 0.348 |
| chr3 | 161438158 | 161438408 | 0.348 |
| chr3 | 162238201 | 162238451 | 0.26 |
| chr3 | 163049817 | 163050067 | 0.276 |
| chr3 | 163869741 | 163869991 | 0.34 |
| chr3 | 164670585 | 164670835 | 0.3 |
| chr3 | 165478954 | 165479204 | 0.348 |
| chr3 | 165491155 | 165491404 | 0.313253 |
| chr3 | 165548392 | 165548641 | 0.401606 |
| chr3 | 166281735 | 166281985 | 0.328 |
| chr3 | 167085940 | 167086190 | 0.308 |
| chr3 | 168459468 | 168459718 | 0.308 |
| chr3 | 169309551 | 169309801 | 0.344 |
| chr3 | 170492150 | 170492400 | 0.324 |
| chr3 | 171325476 | 171325726 | 0.312 |
| chr3 | 172228471 | 172228721 | 0.348 |
| chr3 | 173228258 | 173228508 | 0.348 |
| chr3 | 174030196 | 174030446 | 0.348 |
| chr3 | 174909327 | 174909577 | 0.348 |
| chr3 | 176159550 | 176159800 | 0.272 |
| chr3 | 177050167 | 177050417 | 0.296 |
| chr3 | 178235166 | 178235416 | 0.34 |
| chr3 | 179511583 | 179511833 | 0.348 |
| chr3 | 180752251 | 180752501 | 0.344 |
| chr3 | 181861577 | 181861827 | 0.348 |
| chr3 | 182665063 | 182665313 | 0.268 |
| chr3 | 183472150 | 183472400 | 0.348 |
| chr3 | 184526150 | 184526400 | 0.312 |
| chr3 | 185410377 | 185410627 | 0.348 |
| chr3 | 186420548 | 186420798 | 0.324 |
| chr3 | 187267150 | 187267400 | 0.348 |
| chr3 | 188173164 | 188173414 | 0.348 |
| chr3 | 189008153 | 189008403 | 0.348 |
| chr3 | 189809150 | 189809400 | 0.28 |
| chr3 | 190627116 | 190627366 | 0.348 |
| chr3 | 191447581 | 191447831 | 0.348 |
| chr3 | 192375286 | 192375536 | 0.348 |
| chr3 | 193179318 | 193179568 | 0.288 |
| chr3 | 194874250 | 194874500 | 0.348 |
| chr3 | 195777466 | 195777716 | 0.348 |
| chr3 | 196621577 | 196621827 | 0.312 |
| chr3 | 197424150 | 197424400 | 0.308 |
| chr4 | 524439 | 524689 | 0.348 |
| chr4 | 1694543 | 1694793 | 0.296 |
| chr4 | 1806047 | 1806226 | 0.653631 |
| chr4 | 2590392 | 2590642 | 0.348 |
| chr4 | 3408543 | 3408793 | 0.348 |
| chr4 | 4248009 | 4248259 | 0.34 |
| chr4 | 5073125 | 5073375 | 0.32 |
| chr4 | 5911997 | 5912247 | 0.292 |
| chr4 | 6786181 | 6786431 | 0.348 |
| chr4 | 7889150 | 7889400 | 0.284 |
| chr4 | 8768669 | 8768919 | 0.348 |
| chr4 | 11023186 | 11023436 | 0.348 |
| chr4 | 11924150 | 11924400 | 0.332 |
| chr4 | 12802731 | 12802981 | 0.348 |
| chr4 | 13608443 | 13608693 | 0.3 |
| chr4 | 14700204 | 14700454 | 0.348 |
| chr4 | 15516150 | 15516400 | 0.316 |
| chr4 | 16593239 | 16593489 | 0.348 |
| chr4 | 17959355 | 17959605 | 0.34 |
| chr4 | 19122551 | 19122801 | 0.348 |
| chr4 | 20409254 | 20409504 | 0.348 |
| chr4 | 21274269 | 21274519 | 0.32 |
| chr4 | 22246426 | 22246676 | 0.34 |
| chr4 | 23364150 | 23364400 | 0.348 |
| chr4 | 24165166 | 24165416 | 0.348 |
| chr4 | 25408550 | 25408800 | 0.268 |
| chr4 | 26570550 | 26570800 | 0.292 |
| chr4 | 27713150 | 27713400 | 0.3 |
| chr4 | 28518303 | 28518553 | 0.348 |
| chr4 | 29328570 | 29328820 | 0.348 |
| chr4 | 30272440 | 30272690 | 0.32 |
| chr4 | 31367442 | 31367692 | 0.348 |
| chr4 | 32172526 | 32172776 | 0.34 |
| chr4 | 32976113 | 32976363 | 0.268 |
| chr4 | 33782576 | 33782826 | 0.34 |
| chr4 | 35566150 | 35566400 | 0.268 |
| chr4 | 36384406 | 36384656 | 0.328 |
| chr4 | 37187183 | 37187433 | 0.348 |
| chr4 | 38037150 | 38037400 | 0.34 |
| chr4 | 38857304 | 38857554 | 0.348 |
| chr4 | 39657375 | 39657625 | 0.3 |
| chr4 | 40457994 | 40458244 | 0.332 |
| chr4 | 41262121 | 41262371 | 0.348 |
| chr4 | 42799150 | 42799400 | 0.324 |
| chr4 | 43607150 | 43607400 | 0.308 |
| chr4 | 44408802 | 44409052 | 0.276 |
| chr4 | 45217030 | 45217280 | 0.32 |
| chr4 | 46213423 | 46213673 | 0.348 |
| chr4 | 47159179 | 47159429 | 0.348 |
| chr4 | 48947216 | 48947466 | 0.348 |
| chr4 | 52703125 | 52703375 | 0.348 |
| chr4 | 53519881 | 53520131 | 0.348 |
| chr4 | 54575550 | 54575800 | 0.308 |
| chr4 | 55541150 | 55541400 | 0.332 |
| chr4 | 56681150 | 56681400 | 0.268 |
| chr4 | 57640467 | 57640717 | 0.348 |
| chr4 | 58471328 | 58471578 | 0.344 |
| chr4 | 59809215 | 59809465 | 0.348 |
| chr4 | 60849558 | 60849808 | 0.32 |
| chr4 | 61651913 | 61652163 | 0.3 |
| chr4 | 62453032 | 62453282 | 0.348 |
| chr4 | 63256751 | 63257001 | 0.304 |
| chr4 | 64088143 | 64088393 | 0.256 |
| chr4 | 64899871 | 64900121 | 0.304 |
| chr4 | 65701600 | 65701850 | 0.296 |
| chr4 | 66514018 | 66514268 | 0.348 |
| chr4 | 67894302 | 67894552 | 0.348 |
| chr4 | 68776550 | 68776800 | 0.34 |
| chr4 | 69576924 | 69577174 | 0.348 |
| chr4 | 70382938 | 70383188 | 0.288 |
| chr4 | 71237341 | 71237591 | 0.348 |
| chr4 | 72411150 | 72411400 | 0.336 |
| chr4 | 73710150 | 73710400 | 0.344 |
| chr4 | 75071150 | 75071400 | 0.328 |
| chr4 | 76179362 | 76179612 | 0.348 |
| chr4 | 77033574 | 77033824 | 0.348 |
| chr4 | 77846718 | 77846968 | 0.288 |
| chr4 | 78648984 | 78649234 | 0.272 |
| chr4 | 79457938 | 79458188 | 0.344 |
| chr4 | 80278331 | 80278581 | 0.34 |
| chr4 | 81378288 | 81378538 | 0.324 |
| chr4 | 82584150 | 82584400 | 0.348 |
| chr4 | 83424150 | 83424400 | 0.284 |
| chr4 | 84768150 | 84768400 | 0.34 |
| chr4 | 86164348 | 86164598 | 0.32 |
| chr4 | 87420154 | 87420404 | 0.348 |
| chr4 | 88759560 | 88759810 | 0.348 |
| chr4 | 89613224 | 89613474 | 0.348 |
| chr4 | 90622593 | 90622843 | 0.348 |
| chr4 | 91908223 | 91908473 | 0.344 |
| chr4 | 92715215 | 92715465 | 0.348 |
| chr4 | 94023452 | 94023702 | 0.308 |
| chr4 | 95644839 | 95645089 | 0.288 |
| chr4 | 96736322 | 96736572 | 0.348 |
| chr4 | 98008150 | 98008400 | 0.316 |
| chr4 | 99308150 | 99308400 | 0.284 |
| chr4 | 100232150 | 100232400 | 0.332 |
| chr4 | 100543788 | 100544038 | 0.42 |
| chr4 | 101068550 | 101068800 | 0.344 |
| chr4 | 101875150 | 101875400 | 0.348 |
| chr4 | 102676263 | 102676513 | 0.348 |
| chr4 | 103487276 | 103487526 | 0.308 |
| chr4 | 104289731 | 104289981 | 0.296 |
| chr4 | 105095425 | 105095675 | 0.284 |
| chr4 | 105907870 | 105908120 | 0.332 |
| chr4 | 107094224 | 107094474 | 0.332 |
| chr4 | 108325550 | 108325800 | 0.332 |
| chr4 | 109267150 | 109267400 | 0.344 |
| chr4 | 110081150 | 110081400 | 0.296 |
| chr4 | 110970150 | 110970400 | 0.348 |
| chr4 | 111958216 | 111958466 | 0.348 |
| chr4 | 112823591 | 112823841 | 0.348 |
| chr4 | 113629945 | 113630195 | 0.264 |
| chr4 | 115384150 | 115384400 | 0.328 |
| chr4 | 116190298 | 116190548 | 0.348 |
| chr4 | 117009231 | 117009481 | 0.3 |
| chr4 | 117809721 | 117809971 | 0.336 |
| chr4 | 118609887 | 118610137 | 0.324 |
| chr4 | 119597337 | 119597587 | 0.348 |
| chr4 | 120411943 | 120412193 | 0.268 |
| chr4 | 121214719 | 121214969 | 0.348 |
| chr4 | 122018543 | 122018793 | 0.348 |
| chr4 | 122820118 | 122820368 | 0.332 |
| chr4 | 123622182 | 123622432 | 0.284 |
| chr4 | 123663257 | 123663507 | 0.36 |
| chr4 | 123663787 | 123664037 | 0.392 |
| chr4 | 123663985 | 123664235 | 0.408 |
| chr4 | 123664405 | 123664655 | 0.436 |
| chr4 | 124422894 | 124423144 | 0.324 |
| chr4 | 125512382 | 125512632 | 0.264 |
| chr4 | 126813261 | 126813511 | 0.348 |
| chr4 | 127615051 | 127615301 | 0.3 |
| chr4 | 128419953 | 128420203 | 0.348 |
| chr4 | 129523487 | 129523737 | 0.348 |
| chr4 | 130323522 | 130323772 | 0.348 |
| chr4 | 131125980 | 131126230 | 0.256 |
| chr4 | 131938368 | 131938618 | 0.304 |
| chr4 | 132925295 | 132925545 | 0.332 |
| chr4 | 133727028 | 133727278 | 0.292 |
| chr4 | 134535097 | 134535347 | 0.336 |
| chr4 | 135337052 | 135337302 | 0.284 |
| chr4 | 136137384 | 136137634 | 0.276 |
| chr4 | 136938690 | 136938940 | 0.328 |
| chr4 | 137875318 | 137875568 | 0.348 |
| chr4 | 138925335 | 138925585 | 0.348 |
| chr4 | 139726418 | 139726668 | 0.348 |
| chr4 | 140766433 | 140766683 | 0.348 |
| chr4 | 142917150 | 142917400 | 0.284 |
| chr4 | 143721319 | 143721569 | 0.344 |
| chr4 | 144616150 | 144616400 | 0.272 |
| chr4 | 145420015 | 145420265 | 0.332 |
| chr4 | 146237783 | 146238033 | 0.3 |
| chr4 | 146560230 | 146560480 | 0.436 |
| chr4 | 146560327 | 146560577 | 0.396 |
| chr4 | 146560432 | 146560682 | 0.404 |
| chr4 | 146560450 | 146560700 | 0.396 |
| chr4 | 146560519 | 146560769 | 0.372 |
| chr4 | 146560579 | 146560829 | 0.356 |
| chr4 | 146563453 | 146563703 | 0.4 |
| chr4 | 146563507 | 146563757 | 0.436 |
| chr4 | 146567088 | 146567338 | 0.38 |
| chr4 | 146567195 | 146567445 | 0.352 |
| chr4 | 146576280 | 146576530 | 0.476 |
| chr4 | 147039150 | 147039400 | 0.348 |
| chr4 | 147861172 | 147861422 | 0.348 |
| chr4 | 148947515 | 148947765 | 0.348 |
| chr4 | 149763150 | 149763400 | 0.336 |
| chr4 | 151024279 | 151024529 | 0.3 |
| chr4 | 151837404 | 151837654 | 0.308 |
| chr4 | 152647195 | 152647445 | 0.324 |
| chr4 | 154417224 | 154417474 | 0.348 |
| chr4 | 155217502 | 155217752 | 0.348 |
| chr4 | 156024046 | 156024296 | 0.348 |
| chr4 | 156824354 | 156824604 | 0.316 |
| chr4 | 157626326 | 157626576 | 0.332 |
| chr4 | 158431044 | 158431294 | 0.296 |
| chr4 | 159237626 | 159237876 | 0.348 |
| chr4 | 160045854 | 160046104 | 0.28 |
| chr4 | 160857413 | 160857663 | 0.312 |
| chr4 | 161657414 | 161657664 | 0.344 |
| chr4 | 162457547 | 162457797 | 0.304 |
| chr4 | 163258332 | 163258582 | 0.348 |
| chr4 | 164775219 | 164775469 | 0.348 |
| chr4 | 165581368 | 165581618 | 0.332 |
| chr4 | 166385754 | 166386004 | 0.348 |
| chr4 | 167194635 | 167194885 | 0.332 |
| chr4 | 167998589 | 167998839 | 0.296 |
| chr4 | 168813970 | 168814220 | 0.324 |
| chr4 | 169620754 | 169621004 | 0.32 |
| chr4 | 170428650 | 170428900 | 0.292 |
| chr4 | 172239593 | 172239843 | 0.308 |
| chr4 | 173054299 | 173054549 | 0.348 |
| chr4 | 173854598 | 173854848 | 0.268 |
| chr4 | 174658150 | 174658400 | 0.348 |
| chr4 | 175674466 | 175674716 | 0.348 |
| chr4 | 176773440 | 176773690 | 0.324 |
| chr4 | 177574380 | 177574630 | 0.288 |
| chr4 | 178354254 | 178354504 | 0.344 |
| chr4 | 178376420 | 178376670 | 0.348 |
| chr4 | 179177025 | 179177275 | 0.324 |
| chr4 | 179990413 | 179990663 | 0.324 |
| chr4 | 180955150 | 180955400 | 0.332 |
| chr4 | 181758151 | 181758401 | 0.348 |
| chr4 | 182559169 | 182559419 | 0.348 |
| chr4 | 183364952 | 183365202 | 0.348 |
| chr4 | 184169569 | 184169819 | 0.308 |
| chr4 | 184975478 | 184975728 | 0.328 |
| chr4 | 185777424 | 185777674 | 0.348 |
| chr4 | 186586136 | 186586386 | 0.272 |
| chr4 | 187195222 | 187195472 | 0.476 |
| chr4 | 187201287 | 187201537 | 0.512 |
| chr4 | 187833378 | 187833628 | 0.348 |
| chr4 | 188635326 | 188635576 | 0.348 |
| chr4 | 189455666 | 189455916 | 0.348 |
| chr5 | 925341 | 925591 | 0.348 |
| chr5 | 1760577 | 1760827 | 0.348 |
| chr5 | 2571762 | 2572012 | 0.348 |
| chr5 | 3908300 | 3908550 | 0.328 |
| chr5 | 5808362 | 5808612 | 0.348 |
| chr5 | 7066150 | 7066400 | 0.332 |
| chr5 | 7929390 | 7929640 | 0.348 |
| chr5 | 8884167 | 8884417 | 0.348 |
| chr5 | 9694150 | 9694400 | 0.312 |
| chr5 | 11072336 | 11072586 | 0.348 |
| chr5 | 11925598 | 11925848 | 0.348 |
| chr5 | 12734408 | 12734658 | 0.348 |
| chr5 | 14411235 | 14411485 | 0.348 |
| chr5 | 16434161 | 16434411 | 0.348 |
| chr5 | 16434161 | 16434411 | 0.348 |
| chr5 | 17378337 | 17378587 | 0.348 |
| chr5 | 18379157 | 18379407 | 0.348 |
| chr5 | 19179651 | 19179901 | 0.32 |
| chr5 | 19982105 | 19982355 | 0.272 |
| chr5 | 21021592 | 21021842 | 0.332 |
| chr5 | 22260550 | 22260800 | 0.308 |
| chr5 | 23427408 | 23427658 | 0.316 |
| chr5 | 24333150 | 24333400 | 0.252 |
| chr5 | 25638150 | 25638400 | 0.32 |
| chr5 | 26472150 | 26472400 | 0.344 |
| chr5 | 27277073 | 27277323 | 0.348 |
| chr5 | 28441164 | 28441414 | 0.328 |
| chr5 | 29277434 | 29277684 | 0.348 |
| chr5 | 30147460 | 30147710 | 0.28 |
| chr5 | 30965150 | 30965400 | 0.304 |
| chr5 | 32276489 | 32276739 | 0.348 |
| chr5 | 33120530 | 33120780 | 0.336 |
| chr5 | 33963570 | 33963820 | 0.348 |
| chr5 | 34808150 | 34808400 | 0.276 |
| chr5 | 35611221 | 35611471 | 0.34 |
| chr5 | 36450561 | 36450811 | 0.348 |
| chr5 | 38217206 | 38217456 | 0.348 |
| chr5 | 39308293 | 39308543 | 0.344 |
| chr5 | 40243400 | 40243650 | 0.348 |
| chr5 | 41069505 | 41069755 | 0.308 |
| chr5 | 42023181 | 42023431 | 0.348 |
| chr5 | 42907557 | 42907807 | 0.264 |
| chr5 | 43869212 | 43869462 | 0.348 |
| chr5 | 44811198 | 44811448 | 0.348 |
| chr5 | 45614193 | 45614443 | 0.348 |
| chr5 | 49559754 | 49560004 | 0.288 |
| chr5 | 51558414 | 51558664 | 0.328 |
| chr5 | 52572333 | 52572583 | 0.348 |
| chr5 | 53692364 | 53692614 | 0.348 |
| chr5 | 54615371 | 54615621 | 0.344 |
| chr5 | 55613299 | 55613549 | 0.316 |
| chr5 | 56865222 | 56865472 | 0.348 |
| chr5 | 57694196 | 57694446 | 0.276 |
| chr5 | 58497233 | 58497483 | 0.252 |
| chr5 | 59329150 | 59329400 | 0.312 |
| chr5 | 60144254 | 60144504 | 0.32 |
| chr5 | 60953095 | 60953345 | 0.348 |
| chr5 | 62167485 | 62167735 | 0.348 |
| chr5 | 63311150 | 63311400 | 0.328 |
| chr5 | 64114150 | 64114400 | 0.312 |
| chr5 | 64921258 | 64921508 | 0.348 |
| chr5 | 65772331 | 65772581 | 0.348 |
| chr5 | 66826161 | 66826411 | 0.348 |
| chr5 | 67641208 | 67641458 | 0.348 |
| chr5 | 68472969 | 68473219 | 0.348 |
| chr5 | 70238181 | 70238430 | 0.37751 |
| chr5 | 70241800 | 70241994 | 0.35567 |
| chr5 | 70247767 | 70247866 | 0.343434 |
| chr5 | 70752734 | 70752984 | 0.348 |
| chr5 | 71556027 | 71556277 | 0.332 |
| chr5 | 72610157 | 72610407 | 0.348 |
| chr5 | 73516578 | 73516828 | 0.316 |
| chr5 | 74016348 | 74016598 | 0.428 |
| chr5 | 74321150 | 74321400 | 0.3 |
| chr5 | 75142529 | 75142779 | 0.324 |
| chr5 | 75949606 | 75949856 | 0.34 |
| chr5 | 76753702 | 76753952 | 0.308 |
| chr5 | 77564503 | 77564753 | 0.348 |
| chr5 | 78373076 | 78373326 | 0.348 |
| chr5 | 79271575 | 79271825 | 0.348 |
| chr5 | 80322374 | 80322624 | 0.348 |
| chr5 | 81143414 | 81143664 | 0.348 |
| chr5 | 82115520 | 82115770 | 0.328 |
| chr5 | 83161167 | 83161417 | 0.252 |
| chr5 | 83962946 | 83963196 | 0.34 |
| chr5 | 84798100 | 84798350 | 0.292 |
| chr5 | 85607624 | 85607874 | 0.28 |
| chr5 | 86610487 | 86610737 | 0.348 |
| chr5 | 87453348 | 87453598 | 0.348 |
| chr5 | 88723150 | 88723400 | 0.268 |
| chr5 | 90119327 | 90119577 | 0.348 |
| chr5 | 91072151 | 91072401 | 0.348 |
| chr5 | 91927392 | 91927642 | 0.316 |
| chr5 | 93066150 | 93066400 | 0.272 |
| chr5 | 94084150 | 94084400 | 0.336 |
| chr5 | 94884324 | 94884574 | 0.308 |
| chr5 | 95817279 | 95817529 | 0.348 |
| chr5 | 96673550 | 96673800 | 0.3 |
| chr5 | 97504150 | 97504400 | 0.308 |
| chr5 | 98705396 | 98705646 | 0.348 |
| chr5 | 99560435 | 99560685 | 0.32 |
| chr5 | 100365824 | 100366074 | 0.34 |
| chr5 | 101174653 | 101174903 | 0.292 |
| chr5 | 102365150 | 102365400 | 0.308 |
| chr5 | 103728150 | 103728400 | 0.332 |
| chr5 | 104531179 | 104531429 | 0.252 |
| chr5 | 105350391 | 105350641 | 0.284 |
| chr5 | 106531361 | 106531611 | 0.348 |
| chr5 | 107570373 | 107570623 | 0.348 |
| chr5 | 108926232 | 108926482 | 0.348 |
| chr5 | 110027150 | 110027400 | 0.328 |
| chr5 | 111196451 | 111196701 | 0.332 |
| chr5 | 112021809 | 112022059 | 0.348 |
| chr5 | 113013150 | 113013400 | 0.328 |
| chr5 | 114065262 | 114065512 | 0.348 |
| chr5 | 114872251 | 114872501 | 0.348 |
| chr5 | 115988311 | 115988561 | 0.348 |
| chr5 | 117001555 | 117001805 | 0.348 |
| chr5 | 117930159 | 117930409 | 0.348 |
| chr5 | 118788222 | 118788472 | 0.656 |
| chr5 | 119230150 | 119230400 | 0.328 |
| chr5 | 120473241 | 120473491 | 0.348 |
| chr5 | 121394548 | 121394798 | 0.348 |
| chr5 | 122571402 | 122571652 | 0.348 |
| chr5 | 123678502 | 123678752 | 0.348 |
| chr5 | 124774217 | 124774467 | 0.348 |
| chr5 | 125616247 | 125616497 | 0.348 |
| chr5 | 126426335 | 126426585 | 0.348 |
| chr5 | 127322174 | 127322424 | 0.336 |
| chr5 | 128479275 | 128479525 | 0.324 |
| chr5 | 129376150 | 129376400 | 0.34 |
| chr5 | 130223163 | 130223413 | 0.348 |
| chr5 | 131031617 | 131031867 | 0.28 |
| chr5 | 131713947 | 131714197 | 0.496 |
| chr5 | 131719848 | 131720098 | 0.488 |
| chr5 | 131722606 | 131722856 | 0.544 |
| chr5 | 131726399 | 131726649 | 0.524 |
| chr5 | 131726406 | 131726656 | 0.536 |
| chr5 | 131728056 | 131728306 | 0.52 |
| chr5 | 131728165 | 131728415 | 0.52 |
| chr5 | 131877011 | 131877261 | 0.348 |
| chr5 | 132746346 | 132746596 | 0.348 |
| chr5 | 133549999 | 133550249 | 0.268 |
| chr5 | 134367907 | 134368157 | 0.348 |
| chr5 | 135271150 | 135271400 | 0.328 |
| chr5 | 136109975 | 136110225 | 0.348 |
| chr5 | 136919859 | 136920109 | 0.348 |
| chr5 | 137721384 | 137721634 | 0.348 |
| chr5 | 138617755 | 138618005 | 0.348 |
| chr5 | 139437032 | 139437282 | 0.32 |
| chr5 | 140243745 | 140243995 | 0.284 |
| chr5 | 141342082 | 141342332 | 0.348 |
| chr5 | 142430497 | 142430747 | 0.348 |
| chr5 | 143263150 | 143263400 | 0.312 |
| chr5 | 144100481 | 144100731 | 0.348 |
| chr5 | 144924251 | 144924501 | 0.332 |
| chr5 | 145821033 | 145821283 | 0.348 |
| chr5 | 146723352 | 146723602 | 0.284 |
| chr5 | 148103150 | 148103400 | 0.348 |
| chr5 | 149357488 | 149357738 | 0.448 |
| chr5 | 149357622 | 149357872 | 0.416 |
| chr5 | 149360046 | 149360296 | 0.396 |
| chr5 | 149360988 | 149361238 | 0.448 |
| chr5 | 150168418 | 150168668 | 0.348 |
| chr5 | 151153336 | 151153586 | 0.312 |
| chr5 | 151974339 | 151974589 | 0.252 |
| chr5 | 153079172 | 153079422 | 0.348 |
| chr5 | 154769590 | 154769840 | 0.348 |
| chr5 | 155629221 | 155629471 | 0.348 |
| chr5 | 155771459 | 155771709 | 0.46 |
| chr5 | 156569984 | 156570234 | 0.348 |
| chr5 | 157381960 | 157382210 | 0.336 |
| chr5 | 158468169 | 158468419 | 0.348 |
| chr5 | 159465150 | 159465400 | 0.304 |
| chr5 | 160279480 | 160279730 | 0.348 |
| chr5 | 161080261 | 161080511 | 0.348 |
| chr5 | 161901345 | 161901595 | 0.344 |
| chr5 | 162917271 | 162917521 | 0.32 |
| chr5 | 163717664 | 163717914 | 0.348 |
| chr5 | 164517680 | 164517930 | 0.304 |
| chr5 | 165319177 | 165319427 | 0.348 |
| chr5 | 167015237 | 167015487 | 0.348 |
| chr5 | 167919124 | 167919374 | 0.328 |
| chr5 | 168721160 | 168721410 | 0.348 |
| chr5 | 169550080 | 169550330 | 0.336 |
| chr5 | 170379303 | 170379553 | 0.316 |
| chr5 | 171180930 | 171181180 | 0.348 |
| chr5 | 172017300 | 172017550 | 0.296 |
| chr5 | 172827926 | 172828176 | 0.348 |
| chr5 | 173664137 | 173664387 | 0.348 |
| chr5 | 174480831 | 174481081 | 0.328 |
| chr5 | 175574930 | 175575180 | 0.348 |
| chr5 | 176381946 | 176382196 | 0.348 |
| chr5 | 177419684 | 177419934 | 0.62 |
| chr5 | 177419909 | 177420159 | 0.572 |
| chr5 | 177421022 | 177421272 | 0.588 |
| chr5 | 178424528 | 178424778 | 0.348 |
| chr5 | 179368971 | 179369221 | 0.348 |
| chr5 | 180175488 | 180175738 | 0.34 |
| chr6 | 722215 | 722465 | 0.348 |
| chr6 | 1809311 | 1809561 | 0.332 |
| chr6 | 2680150 | 2680400 | 0.288 |
| chr6 | 3484150 | 3484400 | 0.336 |
| chr6 | 4620332 | 4620582 | 0.344 |
| chr6 | 5431006 | 5431256 | 0.348 |
| chr6 | 6236906 | 6237156 | 0.348 |
| chr6 | 7045378 | 7045628 | 0.348 |
| chr6 | 7964447 | 7964697 | 0.348 |
| chr6 | 9467470 | 9467720 | 0.348 |
| chr6 | 10269525 | 10269775 | 0.348 |
| chr6 | 11927322 | 11927572 | 0.348 |
| chr6 | 12773150 | 12773400 | 0.316 |
| chr6 | 13976150 | 13976400 | 0.34 |
| chr6 | 14834528 | 14834778 | 0.348 |
| chr6 | 16162150 | 16162400 | 0.348 |
| chr6 | 18388156 | 18388406 | 0.348 |
| chr6 | 19660443 | 19660693 | 0.348 |
| chr6 | 20718512 | 20718762 | 0.348 |
| chr6 | 21534150 | 21534400 | 0.336 |
| chr6 | 22919570 | 22919820 | 0.348 |
| chr6 | 23724897 | 23725147 | 0.344 |
| chr6 | 24533878 | 24534128 | 0.348 |
| chr6 | 25335487 | 25335737 | 0.284 |
| chr6 | 26142116 | 26142366 | 0.348 |
| chr6 | 26999810 | 27000060 | 0.328 |
| chr6 | 27984245 | 27984495 | 0.348 |
| chr6 | 29227316 | 29227566 | 0.348 |
| chr6 | 30035500 | 30035750 | 0.348 |
| chr6 | 32257190 | 32257440 | 0.276 |
| chr6 | 33061928 | 33062178 | 0.348 |
| chr6 | 34249129 | 34249379 | 0.348 |
| chr6 | 35564395 | 35564645 | 0.348 |
| chr6 | 36402380 | 36402630 | 0.292 |
| chr6 | 37220892 | 37221142 | 0.344 |
| chr6 | 38024507 | 38024757 | 0.348 |
| chr6 | 38825212 | 38825462 | 0.348 |
| chr6 | 39628292 | 39628542 | 0.348 |
| chr6 | 40473041 | 40473291 | 0.348 |
| chr6 | 41760316 | 41760566 | 0.348 |
| chr6 | 42561087 | 42561337 | 0.312 |
| chr6 | 43513955 | 43514205 | 0.348 |
| chr6 | 45170150 | 45170400 | 0.272 |
| chr6 | 46210189 | 46210439 | 0.348 |
| chr6 | 47012116 | 47012366 | 0.348 |
| chr6 | 47816800 | 47817050 | 0.336 |
| chr6 | 49160150 | 49160400 | 0.296 |
| chr6 | 50331150 | 50331400 | 0.348 |
| chr6 | 51133231 | 51133481 | 0.348 |
| chr6 | 51524100 | 51524284 | 0.429348 |
| chr6 | 51524387 | 51524577 | 0.452632 |
| chr6 | 51524477 | 51524726 | 0.417671 |
| chr6 | 51612557 | 51612806 | 0.453815 |
| chr6 | 51612759 | 51613008 | 0.413655 |
| chr6 | 51613242 | 51613431 | 0.47619 |
| chr6 | 51617943 | 51618148 | 0.463415 |
| chr6 | 51637377 | 51637626 | 0.35743 |
| chr6 | 51712574 | 51712767 | 0.492228 |
| chr6 | 51747804 | 51748053 | 0.381526 |
| chr6 | 51824498 | 51824736 | 0.390756 |
| chr6 | 51882240 | 51882489 | 0.522088 |
| chr6 | 51889261 | 51889460 | 0.432161 |
| chr6 | 51889530 | 51889709 | 0.430168 |
| chr6 | 51889613 | 51889863 | 0.488 |
| chr6 | 51890671 | 51890920 | 0.566265 |
| chr6 | 51892991 | 51893208 | 0.562212 |
| chr6 | 51907748 | 51907997 | 0.37751 |
| chr6 | 51910894 | 51911114 | 0.413636 |
| chr6 | 51914920 | 51915167 | 0.538462 |
| chr6 | 51923055 | 51923235 | 0.522222 |
| chr6 | 51927226 | 51927475 | 0.473896 |
| chr6 | 51934785 | 51935035 | 0.348 |
| chr6 | 51935792 | 51936041 | 0.409639 |
| chr6 | 51944632 | 51944881 | 0.465863 |
| chr6 | 51947894 | 51948003 | 0.40367 |
| chr6 | 52866150 | 52866400 | 0.316 |
| chr6 | 53861150 | 53861400 | 0.336 |
| chr6 | 54968397 | 54968647 | 0.344 |
| chr6 | 56323494 | 56323744 | 0.348 |
| chr6 | 57132985 | 57133235 | 0.348 |
| chr6 | 58613218 | 58613468 | 0.348 |
| chr6 | 61967821 | 61968071 | 0.348 |
| chr6 | 62792394 | 62792644 | 0.344 |
| chr6 | 63594685 | 63594935 | 0.304 |
| chr6 | 64396571 | 64396821 | 0.332 |
| chr6 | 65487243 | 65487493 | 0.336 |
| chr6 | 66471331 | 66471581 | 0.348 |
| chr6 | 67540150 | 67540400 | 0.344 |
| chr6 | 68869150 | 68869400 | 0.32 |
| chr6 | 69669354 | 69669604 | 0.268 |
| chr6 | 70496481 | 70496731 | 0.332 |
| chr6 | 71310224 | 71310474 | 0.348 |
| chr6 | 72112966 | 72113216 | 0.304 |
| chr6 | 73660449 | 73660699 | 0.348 |
| chr6 | 74960150 | 74960400 | 0.324 |
| chr6 | 76010150 | 76010400 | 0.332 |
| chr6 | 76814286 | 76814536 | 0.348 |
| chr6 | 78002389 | 78002639 | 0.348 |
| chr6 | 78924155 | 78924405 | 0.348 |
| chr6 | 79983150 | 79983400 | 0.312 |
| chr6 | 81262398 | 81262648 | 0.328 |
| chr6 | 82072150 | 82072400 | 0.336 |
| chr6 | 83412551 | 83412801 | 0.348 |
| chr6 | 84224150 | 84224400 | 0.336 |
| chr6 | 85024384 | 85024634 | 0.348 |
| chr6 | 85824865 | 85825115 | 0.328 |
| chr6 | 86646607 | 86646857 | 0.348 |
| chr6 | 87730150 | 87730400 | 0.328 |
| chr6 | 89879586 | 89879836 | 0.3 |
| chr6 | 90941239 | 90941489 | 0.348 |
| chr6 | 91745267 | 91745517 | 0.348 |
| chr6 | 92548166 | 92548416 | 0.348 |
| chr6 | 93371163 | 93371413 | 0.276 |
| chr6 | 94317550 | 94317800 | 0.316 |
| chr6 | 95153242 | 95153492 | 0.348 |
| chr6 | 96076584 | 96076834 | 0.304 |
| chr6 | 96895352 | 96895602 | 0.34 |
| chr6 | 97836178 | 97836428 | 0.336 |
| chr6 | 99178177 | 99178427 | 0.348 |
| chr6 | 100312150 | 100312400 | 0.304 |
| chr6 | 101668268 | 101668518 | 0.348 |
| chr6 | 102469310 | 102469560 | 0.252 |
| chr6 | 103270888 | 103271138 | 0.348 |
| chr6 | 104071706 | 104071956 | 0.348 |
| chr6 | 104881263 | 104881513 | 0.348 |
| chr6 | 105881364 | 105881614 | 0.328 |
| chr6 | 106961211 | 106961461 | 0.348 |
| chr6 | 107880456 | 107880706 | 0.348 |
| chr6 | 108681536 | 108681786 | 0.348 |
| chr6 | 109481761 | 109482011 | 0.344 |
| chr6 | 110618500 | 110618750 | 0.348 |
| chr6 | 111427143 | 111427393 | 0.348 |
| chr6 | 112231415 | 112231665 | 0.348 |
| chr6 | 113042291 | 113042541 | 0.336 |
| chr6 | 113895590 | 113895840 | 0.348 |
| chr6 | 115006168 | 115006418 | 0.348 |
| chr6 | 115806345 | 115806595 | 0.348 |
| chr6 | 116616751 | 116617001 | 0.312 |
| chr6 | 117765567 | 117765817 | 0.348 |
| chr6 | 119110166 | 119110416 | 0.348 |
| chr6 | 119969535 | 119969785 | 0.344 |
| chr6 | 121313474 | 121313724 | 0.324 |
| chr6 | 122234150 | 122234400 | 0.316 |
| chr6 | 123082150 | 123082400 | 0.348 |
| chr6 | 123883938 | 123884188 | 0.336 |
| chr6 | 124688304 | 124688554 | 0.324 |
| chr6 | 125488626 | 125488876 | 0.34 |
| chr6 | 126295238 | 126295488 | 0.312 |
| chr6 | 127319150 | 127319400 | 0.348 |
| chr6 | 128124694 | 128124944 | 0.344 |
| chr6 | 128939956 | 128940206 | 0.32 |
| chr6 | 129747756 | 129748006 | 0.284 |
| chr6 | 130556422 | 130556672 | 0.288 |
| chr6 | 131359186 | 131359436 | 0.252 |
| chr6 | 133276306 | 133276556 | 0.348 |
| chr6 | 134312325 | 134312575 | 0.348 |
| chr6 | 135908218 | 135908468 | 0.348 |
| chr6 | 136827150 | 136827400 | 0.276 |
| chr6 | 137166633 | 137166883 | 0.356 |
| chr6 | 137219252 | 137219502 | 0.396 |
| chr6 | 137219252 | 137219502 | 0.396 |
| chr6 | 137899299 | 137899549 | 0.304 |
| chr6 | 138928325 | 138928575 | 0.348 |
| chr6 | 139961518 | 139961768 | 0.288 |
| chr6 | 141196497 | 141196747 | 0.312 |
| chr6 | 142305254 | 142305504 | 0.348 |
| chr6 | 143107636 | 143107886 | 0.336 |
| chr6 | 144133389 | 144133639 | 0.348 |
| chr6 | 145572150 | 145572400 | 0.336 |
| chr6 | 146529266 | 146529516 | 0.348 |
| chr6 | 147476386 | 147476636 | 0.348 |
| chr6 | 148521155 | 148521405 | 0.316 |
| chr6 | 149329190 | 149329440 | 0.348 |
| chr6 | 150131788 | 150132038 | 0.332 |
| chr6 | 151419594 | 151419844 | 0.348 |
| chr6 | 153113150 | 153113400 | 0.304 |
| chr6 | 153913332 | 153913582 | 0.348 |
| chr6 | 154720810 | 154721060 | 0.34 |
| chr6 | 155536244 | 155536494 | 0.348 |
| chr6 | 156340604 | 156340854 | 0.332 |
| chr6 | 157146448 | 157146698 | 0.316 |
| chr6 | 157956774 | 157957024 | 0.348 |
| chr6 | 159061159 | 159061409 | 0.348 |
| chr6 | 159870327 | 159870577 | 0.264 |
| chr6 | 160671116 | 160671366 | 0.328 |
| chr6 | 161473227 | 161473477 | 0.348 |
| chr6 | 162969538 | 162969788 | 0.336 |
| chr6 | 163775420 | 163775670 | 0.348 |
| chr6 | 164598389 | 164598639 | 0.272 |
| chr6 | 165405401 | 165405651 | 0.348 |
| chr6 | 166950248 | 166950498 | 0.348 |
| chr6 | 167769909 | 167770159 | 0.348 |
| chr6 | 168608835 | 168609085 | 0.348 |
| chr6 | 170242603 | 170242853 | 0.348 |
| chr7 | 55429 | 55679 | 0.348 |
| chr7 | 877046 | 877296 | 0.348 |
| chr7 | 2149206 | 2149456 | 0.348 |
| chr7 | 3107789 | 3108039 | 0.348 |
| chr7 | 3909387 | 3909637 | 0.348 |
| chr7 | 4730421 | 4730671 | 0.336 |
| chr7 | 5703807 | 5704057 | 0.332 |
| chr7 | 6513490 | 6513740 | 0.276 |
| chr7 | 7313867 | 7314117 | 0.348 |
| chr7 | 8124150 | 8124400 | 0.336 |
| chr7 | 8927574 | 8927824 | 0.348 |
| chr7 | 9852228 | 9852478 | 0.348 |
| chr7 | 10714290 | 10714540 | 0.344 |
| chr7 | 11521626 | 11521876 | 0.348 |
| chr7 | 12357745 | 12357995 | 0.332 |
| chr7 | 13758296 | 13758546 | 0.3 |
| chr7 | 14961489 | 14961739 | 0.336 |
| chr7 | 15766151 | 15766401 | 0.348 |
| chr7 | 16571000 | 16571250 | 0.348 |
| chr7 | 18364511 | 18364761 | 0.348 |
| chr7 | 19288150 | 19288400 | 0.296 |
| chr7 | 20093589 | 20093839 | 0.304 |
| chr7 | 20903165 | 20903415 | 0.348 |
| chr7 | 21813150 | 21813400 | 0.308 |
| chr7 | 22626926 | 22627176 | 0.34 |
| chr7 | 24588150 | 24588400 | 0.32 |
| chr7 | 25393154 | 25393404 | 0.348 |
| chr7 | 26207116 | 26207366 | 0.348 |
| chr7 | 27014593 | 27014843 | 0.296 |
| chr7 | 28180480 | 28180730 | 0.336 |
| chr7 | 29609491 | 29609741 | 0.348 |
| chr7 | 30505246 | 30505496 | 0.348 |
| chr7 | 31323318 | 31323568 | 0.288 |
| chr7 | 32129428 | 32129678 | 0.348 |
| chr7 | 32929838 | 32930088 | 0.348 |
| chr7 | 34109582 | 34109832 | 0.348 |
| chr7 | 35308294 | 35308544 | 0.348 |
| chr7 | 36109511 | 36109761 | 0.348 |
| chr7 | 37108150 | 37108400 | 0.348 |
| chr7 | 37908361 | 37908611 | 0.348 |
| chr7 | 38864325 | 38864575 | 0.308 |
| chr7 | 39665162 | 39665412 | 0.348 |
| chr7 | 40477320 | 40477570 | 0.348 |
| chr7 | 41459497 | 41459747 | 0.348 |
| chr7 | 43302476 | 43302726 | 0.348 |
| chr7 | 44330188 | 44330438 | 0.348 |
| chr7 | 45260099 | 45260349 | 0.348 |
| chr7 | 46071390 | 46071640 | 0.288 |
| chr7 | 47421295 | 47421545 | 0.348 |
| chr7 | 48228113 | 48228363 | 0.348 |
| chr7 | 49030589 | 49030839 | 0.348 |
| chr7 | 50227150 | 50227400 | 0.336 |
| chr7 | 52176118 | 52176368 | 0.296 |
| chr7 | 53041150 | 53041400 | 0.32 |
| chr7 | 54163159 | 54163409 | 0.348 |
| chr7 | 54971120 | 54971370 | 0.324 |
| chr7 | 55800266 | 55800516 | 0.348 |
| chr7 | 62624136 | 62624386 | 0.34 |
| chr7 | 63426305 | 63426555 | 0.308 |
| chr7 | 64230137 | 64230387 | 0.292 |
| chr7 | 65372594 | 65372844 | 0.344 |
| chr7 | 67064459 | 67064709 | 0.348 |
| chr7 | 67898887 | 67899137 | 0.348 |
| chr7 | 69412264 | 69412514 | 0.348 |
| chr7 | 70213263 | 70213513 | 0.328 |
| chr7 | 71054944 | 71055194 | 0.28 |
| chr7 | 71874807 | 71875057 | 0.348 |
| chr7 | 72864826 | 72865076 | 0.348 |
| chr7 | 75956713 | 75956963 | 0.348 |
| chr7 | 76814033 | 76814283 | 0.32 |
| chr7 | 77713150 | 77713400 | 0.348 |
| chr7 | 78530571 | 78530821 | 0.276 |
| chr7 | 79336977 | 79337227 | 0.348 |
| chr7 | 80660150 | 80660400 | 0.332 |
| chr7 | 81471944 | 81472194 | 0.34 |
| chr7 | 82293809 | 82294059 | 0.348 |
| chr7 | 83095588 | 83095838 | 0.348 |
| chr7 | 83895809 | 83896059 | 0.344 |
| chr7 | 84696541 | 84696791 | 0.336 |
| chr7 | 85502525 | 85502775 | 0.344 |
| chr7 | 86361434 | 86361684 | 0.324 |
| chr7 | 87162681 | 87162931 | 0.348 |
| chr7 | 87968369 | 87968619 | 0.316 |
| chr7 | 89087150 | 89087400 | 0.328 |
| chr7 | 90162150 | 90162400 | 0.312 |
| chr7 | 91015164 | 91015414 | 0.348 |
| chr7 | 91942336 | 91942586 | 0.348 |
| chr7 | 92132375 | 92132625 | 0.336 |
| chr7 | 92745515 | 92745765 | 0.348 |
| chr7 | 94032150 | 94032400 | 0.312 |
| chr7 | 94879455 | 94879705 | 0.348 |
| chr7 | 95728150 | 95728400 | 0.312 |
| chr7 | 96535542 | 96535792 | 0.348 |
| chr7 | 97356883 | 97357133 | 0.328 |
| chr7 | 98237766 | 98238016 | 0.324 |
| chr7 | 99150089 | 99150339 | 0.348 |
| chr7 | 100141414 | 100141664 | 0.348 |
| chr7 | 101399346 | 101399596 | 0.348 |
| chr7 | 102451481 | 102451731 | 0.324 |
| chr7 | 103335561 | 103335811 | 0.296 |
| chr7 | 104416150 | 104416400 | 0.32 |
| chr7 | 105400093 | 105400343 | 0.348 |
| chr7 | 106232404 | 106232654 | 0.252 |
| chr7 | 107034859 | 107035109 | 0.348 |
| chr7 | 107323858 | 107324108 | 0.336 |
| chr7 | 107330445 | 107330695 | 0.468 |
| chr7 | 107330540 | 107330790 | 0.492 |
| chr7 | 107420025 | 107420275 | 0.356 |
| chr7 | 107542660 | 107542910 | 0.356 |
| chr7 | 107557622 | 107557872 | 0.408 |
| chr7 | 107557669 | 107557919 | 0.432 |
| chr7 | 107557724 | 107557974 | 0.46 |
| chr7 | 107847587 | 107847837 | 0.348 |
| chr7 | 108648804 | 108649054 | 0.348 |
| chr7 | 109458628 | 109458878 | 0.328 |
| chr7 | 110524210 | 110524460 | 0.312 |
| chr7 | 111335538 | 111335788 | 0.332 |
| chr7 | 112398549 | 112398799 | 0.348 |
| chr7 | 113200896 | 113201146 | 0.324 |
| chr7 | 114001693 | 114001943 | 0.328 |
| chr7 | 114966262 | 114966512 | 0.348 |
| chr7 | 115771663 | 115771913 | 0.316 |
| chr7 | 116585570 | 116585820 | 0.296 |
| chr7 | 117149047 | 117149297 | 0.324 |
| chr7 | 117170889 | 117171139 | 0.412 |
| chr7 | 117171034 | 117171284 | 0.38 |
| chr7 | 117199521 | 117199770 | 0.369478 |
| chr7 | 117199607 | 117199796 | 0.354497 |
| chr7 | 117227720 | 117227969 | 0.349398 |
| chr7 | 117227791 | 117227987 | 0.357143 |
| chr7 | 117232148 | 117232398 | 0.372 |
| chr7 | 117246704 | 117246954 | 0.292 |
| chr7 | 117267461 | 117267711 | 0.344 |
| chr7 | 117267636 | 117267886 | 0.428 |
| chr7 | 117279890 | 117280140 | 0.336 |
| chr7 | 117282492 | 117282741 | 0.393574 |
| chr7 | 117622151 | 117622401 | 0.348 |
| chr7 | 118923150 | 118923400 | 0.34 |
| chr7 | 119723802 | 119724052 | 0.348 |
| chr7 | 120536847 | 120537097 | 0.296 |
| chr7 | 121388365 | 121388615 | 0.34 |
| chr7 | 122225191 | 122225441 | 0.288 |
| chr7 | 123119241 | 123119491 | 0.332 |
| chr7 | 124015307 | 124015557 | 0.348 |
| chr7 | 124862547 | 124862797 | 0.308 |
| chr7 | 125665148 | 125665398 | 0.348 |
| chr7 | 126472650 | 126472900 | 0.316 |
| chr7 | 127285399 | 127285649 | 0.348 |
| chr7 | 128300359 | 128300609 | 0.34 |
| chr7 | 129107063 | 129107313 | 0.348 |
| chr7 | 129978355 | 129978605 | 0.348 |
| chr7 | 130780700 | 130780950 | 0.308 |
| chr7 | 131649229 | 131649479 | 0.324 |
| chr7 | 132518150 | 132518400 | 0.34 |
| chr7 | 133418423 | 133418673 | 0.336 |
| chr7 | 134286655 | 134286905 | 0.332 |
| chr7 | 135090145 | 135090395 | 0.348 |
| chr7 | 135899265 | 135899515 | 0.332 |
| chr7 | 136699464 | 136699714 | 0.328 |
| chr7 | 137847153 | 137847403 | 0.348 |
| chr7 | 139280295 | 139280545 | 0.348 |
| chr7 | 140159009 | 140159259 | 0.348 |
| chr7 | 140970360 | 140970610 | 0.348 |
| chr7 | 141800731 | 141800981 | 0.348 |
| chr7 | 142632884 | 142633134 | 0.348 |
| chr7 | 143580134 | 143580384 | 0.348 |
| chr7 | 144381506 | 144381756 | 0.348 |
| chr7 | 145240150 | 145240400 | 0.324 |
| chr7 | 146040527 | 146040777 | 0.272 |
| chr7 | 146864156 | 146864406 | 0.348 |
| chr7 | 147665180 | 147665430 | 0.348 |
| chr7 | 148467130 | 148467380 | 0.348 |
| chr7 | 150033270 | 150033520 | 0.348 |
| chr7 | 150852375 | 150852625 | 0.348 |
| chr7 | 151664082 | 151664332 | 0.296 |
| chr7 | 152570612 | 152570862 | 0.348 |
| chr7 | 153378130 | 153378380 | 0.332 |
| chr7 | 154190449 | 154190699 | 0.348 |
| chr7 | 155072739 | 155072989 | 0.348 |
| chr7 | 155881209 | 155881459 | 0.328 |
| chr7 | 157364150 | 157364400 | 0.324 |
| chr7 | 158567174 | 158567424 | 0.348 |
| chr8 | 192250 | 192500 | 0.348 |
| chr8 | 1003693 | 1003943 | 0.348 |
| chr8 | 1968353 | 1968603 | 0.348 |
| chr8 | 2785184 | 2785434 | 0.348 |
| chr8 | 3594564 | 3594814 | 0.296 |
| chr8 | 4462150 | 4462400 | 0.32 |
| chr8 | 5272274 | 5272524 | 0.348 |
| chr8 | 6079383 | 6079633 | 0.348 |
| chr8 | 6896439 | 6896689 | 0.348 |
| chr8 | 8120898 | 8121148 | 0.284 |
| chr8 | 9159532 | 9159782 | 0.344 |
| chr8 | 9964948 | 9965198 | 0.348 |
| chr8 | 10849178 | 10849428 | 0.348 |
| chr8 | 11664231 | 11664481 | 0.348 |
| chr8 | 12579602 | 12579852 | 0.308 |
| chr8 | 13417150 | 13417400 | 0.328 |
| chr8 | 14462150 | 14462400 | 0.336 |
| chr8 | 15294599 | 15294849 | 0.316 |
| chr8 | 16098431 | 16098681 | 0.348 |
| chr8 | 16901802 | 16902052 | 0.348 |
| chr8 | 17701806 | 17702056 | 0.348 |
| chr8 | 18503290 | 18503540 | 0.328 |
| chr8 | 19316094 | 19316344 | 0.348 |
| chr8 | 20358596 | 20358846 | 0.336 |
| chr8 | 21164416 | 21164666 | 0.316 |
| chr8 | 22141422 | 22141672 | 0.348 |
| chr8 | 22961278 | 22961528 | 0.348 |
| chr8 | 23765128 | 23765378 | 0.348 |
| chr8 | 24589150 | 24589400 | 0.344 |
| chr8 | 25395976 | 25396226 | 0.348 |
| chr8 | 26196689 | 26196939 | 0.344 |
| chr8 | 27061150 | 27061400 | 0.348 |
| chr8 | 27954533 | 27954783 | 0.324 |
| chr8 | 28755361 | 28755611 | 0.332 |
| chr8 | 29557790 | 29558040 | 0.348 |
| chr8 | 30361271 | 30361521 | 0.348 |
| chr8 | 31611150 | 31611400 | 0.304 |
| chr8 | 32611550 | 32611800 | 0.272 |
| chr8 | 33482560 | 33482810 | 0.348 |
| chr8 | 34286695 | 34286945 | 0.292 |
| chr8 | 35095509 | 35095759 | 0.348 |
| chr8 | 35898952 | 35899202 | 0.336 |
| chr8 | 36702296 | 36702546 | 0.348 |
| chr8 | 37538504 | 37538754 | 0.348 |
| chr8 | 39232335 | 39232585 | 0.34 |
| chr8 | 40057492 | 40057742 | 0.348 |
| chr8 | 40861155 | 40861405 | 0.348 |
| chr8 | 41687779 | 41688029 | 0.348 |
| chr8 | 42488236 | 42488486 | 0.348 |
| chr8 | 43296893 | 43297143 | 0.344 |
| chr8 | 47456494 | 47456744 | 0.276 |
| chr8 | 49739152 | 49739402 | 0.348 |
| chr8 | 50539626 | 50539876 | 0.348 |
| chr8 | 51348600 | 51348850 | 0.348 |
| chr8 | 52687557 | 52687807 | 0.284 |
| chr8 | 53732150 | 53732400 | 0.328 |
| chr8 | 54556748 | 54556998 | 0.348 |
| chr8 | 55362843 | 55363093 | 0.348 |
| chr8 | 56218408 | 56218658 | 0.3 |
| chr8 | 57024628 | 57024878 | 0.348 |
| chr8 | 57939209 | 57939459 | 0.348 |
| chr8 | 59069598 | 59069848 | 0.348 |
| chr8 | 62008281 | 62008531 | 0.348 |
| chr8 | 63859170 | 63859420 | 0.348 |
| chr8 | 64808260 | 64808510 | 0.308 |
| chr8 | 67203150 | 67203400 | 0.328 |
| chr8 | 68461150 | 68461400 | 0.348 |
| chr8 | 69596150 | 69596400 | 0.34 |
| chr8 | 70457150 | 70457400 | 0.308 |
| chr8 | 71266150 | 71266400 | 0.348 |
| chr8 | 72260292 | 72260542 | 0.34 |
| chr8 | 73118183 | 73118433 | 0.316 |
| chr8 | 74441212 | 74441462 | 0.348 |
| chr8 | 75565150 | 75565400 | 0.336 |
| chr8 | 76518550 | 76518800 | 0.292 |
| chr8 | 77509332 | 77509582 | 0.348 |
| chr8 | 77895920 | 77896170 | 0.36 |
| chr8 | 78423319 | 78423569 | 0.324 |
| chr8 | 79227653 | 79227903 | 0.328 |
| chr8 | 80038233 | 80038483 | 0.296 |
| chr8 | 80846150 | 80846400 | 0.336 |
| chr8 | 81657150 | 81657400 | 0.292 |
| chr8 | 82795491 | 82795741 | 0.348 |
| chr8 | 83607557 | 83607807 | 0.312 |
| chr8 | 84412845 | 84413095 | 0.288 |
| chr8 | 85516336 | 85516586 | 0.336 |
| chr8 | 86873337 | 86873587 | 0.32 |
| chr8 | 87681621 | 87681871 | 0.332 |
| chr8 | 88481908 | 88482158 | 0.348 |
| chr8 | 90093162 | 90093412 | 0.348 |
| chr8 | 90983285 | 90983535 | 0.288 |
| chr8 | 91158369 | 91158619 | 0.348 |
| chr8 | 92065468 | 92065718 | 0.348 |
| chr8 | 92901150 | 92901400 | 0.328 |
| chr8 | 94611550 | 94611800 | 0.296 |
| chr8 | 95411550 | 95411800 | 0.348 |
| chr8 | 96629348 | 96629598 | 0.272 |
| chr8 | 97873150 | 97873400 | 0.292 |
| chr8 | 99476228 | 99476478 | 0.344 |
| chr8 | 100281617 | 100281867 | 0.348 |
| chr8 | 100454657 | 100454907 | 0.412 |
| chr8 | 100523378 | 100523628 | 0.348 |
| chr8 | 100733076 | 100733326 | 0.392 |
| chr8 | 100830576 | 100830826 | 0.356 |
| chr8 | 100835931 | 100836181 | 0.3 |
| chr8 | 101099280 | 101099530 | 0.344 |
| chr8 | 102559150 | 102559400 | 0.332 |
| chr8 | 104722173 | 104722423 | 0.304 |
| chr8 | 105808550 | 105808800 | 0.348 |
| chr8 | 106610467 | 106610717 | 0.348 |
| chr8 | 107422394 | 107422644 | 0.308 |
| chr8 | 108285311 | 108285561 | 0.348 |
| chr8 | 109090412 | 109090662 | 0.348 |
| chr8 | 109972262 | 109972512 | 0.344 |
| chr8 | 110795150 | 110795400 | 0.316 |
| chr8 | 111908174 | 111908424 | 0.264 |
| chr8 | 112711020 | 112711270 | 0.252 |
| chr8 | 113514731 | 113514981 | 0.348 |
| chr8 | 114740243 | 114740493 | 0.348 |
| chr8 | 115568249 | 115568499 | 0.324 |
| chr8 | 116514193 | 116514443 | 0.348 |
| chr8 | 117360167 | 117360417 | 0.348 |
| chr8 | 118611150 | 118611400 | 0.348 |
| chr8 | 119426175 | 119426425 | 0.348 |
| chr8 | 120338150 | 120338400 | 0.328 |
| chr8 | 121474337 | 121474587 | 0.348 |
| chr8 | 122274620 | 122274870 | 0.336 |
| chr8 | 123089214 | 123089464 | 0.348 |
| chr8 | 124026007 | 124026257 | 0.348 |
| chr8 | 124844530 | 124844780 | 0.348 |
| chr8 | 125653991 | 125654241 | 0.348 |
| chr8 | 126510926 | 126511176 | 0.348 |
| chr8 | 127312793 | 127313043 | 0.34 |
| chr8 | 128133591 | 128133841 | 0.34 |
| chr8 | 129022031 | 129022281 | 0.348 |
| chr8 | 129839921 | 129840171 | 0.328 |
| chr8 | 130654835 | 130655085 | 0.348 |
| chr8 | 131476472 | 131476722 | 0.292 |
| chr8 | 133133387 | 133133637 | 0.348 |
| chr8 | 134746852 | 134747102 | 0.348 |
| chr8 | 135547920 | 135548170 | 0.312 |
| chr8 | 136372136 | 136372386 | 0.348 |
| chr8 | 137311150 | 137311400 | 0.328 |
| chr8 | 138113279 | 138113529 | 0.348 |
| chr8 | 138930098 | 138930348 | 0.348 |
| chr8 | 139733141 | 139733391 | 0.348 |
| chr8 | 140552082 | 140552332 | 0.304 |
| chr8 | 143927698 | 143927948 | 0.348 |
| chr8 | 145640016 | 145640266 | 0.648 |
| chr8 | 145640554 | 145640804 | 0.688 |
| chr8 | 145946790 | 145947040 | 0.348 |
| chr9 | 441472 | 441722 | 0.348 |
| chr9 | 1249421 | 1249671 | 0.344 |
| chr9 | 2865702 | 2865952 | 0.308 |
| chr9 | 3684579 | 3684829 | 0.348 |
| chr9 | 4499494 | 4499744 | 0.3 |
| chr9 | 5611467 | 5611717 | 0.348 |
| chr9 | 6417235 | 6417485 | 0.348 |
| chr9 | 7244553 | 7244803 | 0.348 |
| chr9 | 8056430 | 8056680 | 0.344 |
| chr9 | 8856701 | 8856951 | 0.348 |
| chr9 | 9660879 | 9661129 | 0.348 |
| chr9 | 10463146 | 10463396 | 0.296 |
| chr9 | 11263700 | 11263950 | 0.332 |
| chr9 | 12065601 | 12065851 | 0.344 |
| chr9 | 12872277 | 12872527 | 0.348 |
| chr9 | 13678510 | 13678760 | 0.348 |
| chr9 | 14494878 | 14495128 | 0.348 |
| chr9 | 15310150 | 15310400 | 0.332 |
| chr9 | 16415150 | 16415400 | 0.332 |
| chr9 | 17466150 | 17466400 | 0.3 |
| chr9 | 21059391 | 21059641 | 0.348 |
| chr9 | 22073150 | 22073400 | 0.34 |
| chr9 | 22959266 | 22959516 | 0.348 |
| chr9 | 24120550 | 24120800 | 0.292 |
| chr9 | 25117165 | 25117415 | 0.348 |
| chr9 | 26013411 | 26013661 | 0.348 |
| chr9 | 26820970 | 26821220 | 0.348 |
| chr9 | 27623659 | 27623909 | 0.308 |
| chr9 | 28464150 | 28464400 | 0.272 |
| chr9 | 29277441 | 29277691 | 0.348 |
| chr9 | 30170150 | 30170400 | 0.32 |
| chr9 | 31049150 | 31049400 | 0.316 |
| chr9 | 33112448 | 33112698 | 0.348 |
| chr9 | 33917453 | 33917703 | 0.348 |
| chr9 | 34744366 | 34744616 | 0.348 |
| chr9 | 36071273 | 36071523 | 0.34 |
| chr9 | 38018399 | 38018649 | 0.348 |
| chr9 | 71032343 | 71032593 | 0.348 |
| chr9 | 71833417 | 71833667 | 0.348 |
| chr9 | 72920150 | 72920400 | 0.316 |
| chr9 | 73915530 | 73915780 | 0.32 |
| chr9 | 75167488 | 75167738 | 0.348 |
| chr9 | 76531468 | 76531718 | 0.348 |
| chr9 | 77413560 | 77413810 | 0.348 |
| chr9 | 78522150 | 78522400 | 0.332 |
| chr9 | 79507397 | 79507647 | 0.3 |
| chr9 | 80739535 | 80739785 | 0.348 |
| chr9 | 81567279 | 81567529 | 0.348 |
| chr9 | 82372319 | 82372569 | 0.348 |
| chr9 | 83221150 | 83221400 | 0.348 |
| chr9 | 84202150 | 84202400 | 0.348 |
| chr9 | 85081150 | 85081400 | 0.332 |
| chr9 | 85987217 | 85987467 | 0.348 |
| chr9 | 86799808 | 86800058 | 0.32 |
| chr9 | 87600430 | 87600680 | 0.34 |
| chr9 | 88575150 | 88575400 | 0.328 |
| chr9 | 89393921 | 89394171 | 0.348 |
| chr9 | 90196155 | 90196405 | 0.348 |
| chr9 | 91389150 | 91389400 | 0.316 |
| chr9 | 92224150 | 92224400 | 0.34 |
| chr9 | 93027865 | 93028115 | 0.348 |
| chr9 | 93881161 | 93881411 | 0.348 |
| chr9 | 94685863 | 94686113 | 0.332 |
| chr9 | 95551224 | 95551474 | 0.324 |
| chr9 | 96382913 | 96383163 | 0.348 |
| chr9 | 97206756 | 97207006 | 0.348 |
| chr9 | 98010068 | 98010318 | 0.3 |
| chr9 | 98910804 | 98911054 | 0.348 |
| chr9 | 100612919 | 100613169 | 0.348 |
| chr9 | 102040150 | 102040400 | 0.348 |
| chr9 | 103037412 | 103037662 | 0.348 |
| chr9 | 104113326 | 104113576 | 0.348 |
| chr9 | 104184056 | 104184306 | 0.512 |
| chr9 | 104187132 | 104187382 | 0.516 |
| chr9 | 104187690 | 104187940 | 0.52 |
| chr9 | 104189655 | 104189905 | 0.512 |
| chr9 | 104192058 | 104192308 | 0.544 |
| chr9 | 104193030 | 104193280 | 0.524 |
| chr9 | 104920172 | 104920422 | 0.336 |
| chr9 | 105721671 | 105721921 | 0.304 |
| chr9 | 106523521 | 106523771 | 0.264 |
| chr9 | 107485162 | 107485412 | 0.348 |
| chr9 | 108536234 | 108536484 | 0.348 |
| chr9 | 109563573 | 109563823 | 0.348 |
| chr9 | 110626420 | 110626670 | 0.348 |
| chr9 | 111662458 | 111662708 | 0.444 |
| chr9 | 111732400 | 111732650 | 0.348 |
| chr9 | 113340650 | 113340900 | 0.332 |
| chr9 | 114144997 | 114145247 | 0.308 |
| chr9 | 114957028 | 114957278 | 0.348 |
| chr9 | 115762575 | 115762825 | 0.308 |
| chr9 | 116577087 | 116577337 | 0.348 |
| chr9 | 117441289 | 117441539 | 0.328 |
| chr9 | 118963361 | 118963611 | 0.348 |
| chr9 | 119460264 | 119460514 | 0.6 |
| chr9 | 119888150 | 119888400 | 0.288 |
| chr9 | 121125150 | 121125400 | 0.336 |
| chr9 | 122426151 | 122426401 | 0.348 |
| chr9 | 123520150 | 123520400 | 0.332 |
| chr9 | 124683228 | 124683478 | 0.348 |
| chr9 | 125485603 | 125485853 | 0.34 |
| chr9 | 127505527 | 127505777 | 0.348 |
| chr9 | 128307968 | 128308218 | 0.348 |
| chr9 | 129109844 | 129110094 | 0.348 |
| chr9 | 129916775 | 129917025 | 0.348 |
| chr9 | 131244670 | 131244920 | 0.348 |
| chr9 | 132573290 | 132573540 | 0.348 |
| chr9 | 133333811 | 133334061 | 0.64 |
| chr9 | 133413285 | 133413535 | 0.348 |
| chr9 | 134486613 | 134486863 | 0.348 |
| chr9 | 135288372 | 135288622 | 0.348 |
| chr9 | 136280107 | 136280357 | 0.348 |
| chr9 | 137460915 | 137461165 | 0.32 |
| chr9 | 138342214 | 138342464 | 0.348 |
| chr9 | 139306976 | 139307226 | 0.268 |
| chr9 | 140524526 | 140524776 | 0.348 |
| chr10 | 871150 | 871400 | 0.348 |
| chr10 | 2124524 | 2124774 | 0.252 |
| chr10 | 2929327 | 2929577 | 0.348 |
| chr10 | 4220150 | 4220400 | 0.336 |
| chr10 | 5176559 | 5176809 | 0.336 |
| chr10 | 6343194 | 6343444 | 0.344 |
| chr10 | 7390225 | 7390475 | 0.348 |
| chr10 | 8257298 | 8257548 | 0.348 |
| chr10 | 9058150 | 9058400 | 0.3 |
| chr10 | 9876196 | 9876446 | 0.348 |
| chr10 | 10677282 | 10677532 | 0.348 |
| chr10 | 11492282 | 11492532 | 0.348 |
| chr10 | 12401604 | 12401854 | 0.348 |
| chr10 | 13224650 | 13224900 | 0.348 |
| chr10 | 14043964 | 14044214 | 0.348 |
| chr10 | 14853423 | 14853673 | 0.348 |
| chr10 | 15658199 | 15658449 | 0.316 |
| chr10 | 16622416 | 16622666 | 0.344 |
| chr10 | 17516150 | 17516400 | 0.276 |
| chr10 | 18901507 | 18901757 | 0.336 |
| chr10 | 19710316 | 19710566 | 0.344 |
| chr10 | 20513351 | 20513601 | 0.348 |
| chr10 | 21313889 | 21314139 | 0.348 |
| chr10 | 22142078 | 22142328 | 0.348 |
| chr10 | 22944374 | 22944624 | 0.348 |
| chr10 | 25115150 | 25115400 | 0.34 |
| chr10 | 25924260 | 25924510 | 0.348 |
| chr10 | 26730024 | 26730274 | 0.3 |
| chr10 | 27655856 | 27656106 | 0.348 |
| chr10 | 28491351 | 28491601 | 0.348 |
| chr10 | 29660163 | 29660413 | 0.348 |
| chr10 | 30460737 | 30460987 | 0.332 |
| chr10 | 31312134 | 31312384 | 0.312 |
| chr10 | 32164168 | 32164418 | 0.348 |
| chr10 | 33112517 | 33112767 | 0.308 |
| chr10 | 34810150 | 34810400 | 0.296 |
| chr10 | 35813150 | 35813400 | 0.34 |
| chr10 | 37514244 | 37514494 | 0.288 |
| chr10 | 38417233 | 38417483 | 0.348 |
| chr10 | 42889111 | 42889361 | 0.34 |
| chr10 | 43849286 | 43849536 | 0.348 |
| chr10 | 44650414 | 44650664 | 0.348 |
| chr10 | 45497370 | 45497620 | 0.32 |
| chr10 | 49404717 | 49404967 | 0.348 |
| chr10 | 50210193 | 50210443 | 0.348 |
| chr10 | 51026129 | 51026379 | 0.348 |
| chr10 | 52010556 | 52010806 | 0.348 |
| chr10 | 53059445 | 53059695 | 0.348 |
| chr10 | 54008212 | 54008462 | 0.304 |
| chr10 | 55079406 | 55079656 | 0.328 |
| chr10 | 55884413 | 55884663 | 0.348 |
| chr10 | 57175168 | 57175418 | 0.304 |
| chr10 | 58259360 | 58259610 | 0.32 |
| chr10 | 59429265 | 59429515 | 0.348 |
| chr10 | 60330265 | 60330515 | 0.348 |
| chr10 | 61209233 | 61209483 | 0.348 |
| chr10 | 62192170 | 62192420 | 0.348 |
| chr10 | 63359159 | 63359409 | 0.348 |
| chr10 | 64382591 | 64382841 | 0.332 |
| chr10 | 65188150 | 65188400 | 0.336 |
| chr10 | 65996966 | 65997216 | 0.348 |
| chr10 | 66856797 | 66857047 | 0.34 |
| chr10 | 67661286 | 67661536 | 0.348 |
| chr10 | 68465570 | 68465820 | 0.348 |
| chr10 | 69265603 | 69265853 | 0.284 |
| chr10 | 70087603 | 70087853 | 0.284 |
| chr10 | 70891648 | 70891898 | 0.312 |
| chr10 | 71718353 | 71718603 | 0.348 |
| chr10 | 72578751 | 72579001 | 0.344 |
| chr10 | 73736422 | 73736672 | 0.348 |
| chr10 | 74541034 | 74541284 | 0.348 |
| chr10 | 75344307 | 75344557 | 0.296 |
| chr10 | 76146051 | 76146301 | 0.288 |
| chr10 | 76988866 | 76989116 | 0.348 |
| chr10 | 78429430 | 78429680 | 0.348 |
| chr10 | 79322018 | 79322268 | 0.348 |
| chr10 | 80218152 | 80218402 | 0.348 |
| chr10 | 81110884 | 81111134 | 0.348 |
| chr10 | 82759514 | 82759764 | 0.348 |
| chr10 | 83909150 | 83909400 | 0.324 |
| chr10 | 84718905 | 84719155 | 0.348 |
| chr10 | 85528253 | 85528503 | 0.348 |
| chr10 | 86363170 | 86363420 | 0.348 |
| chr10 | 87163913 | 87164163 | 0.348 |
| chr10 | 87972367 | 87972617 | 0.348 |
| chr10 | 89475150 | 89475400 | 0.348 |
| chr10 | 90512150 | 90512400 | 0.328 |
| chr10 | 91327550 | 91327800 | 0.336 |
| chr10 | 92191303 | 92191553 | 0.348 |
| chr10 | 92993341 | 92993591 | 0.312 |
| chr10 | 93806630 | 93806880 | 0.304 |
| chr10 | 95371273 | 95371523 | 0.32 |
| chr10 | 96172179 | 96172429 | 0.324 |
| chr10 | 96973624 | 96973874 | 0.3 |
| chr10 | 97793018 | 97793268 | 0.34 |
| chr10 | 98599885 | 98600135 | 0.308 |
| chr10 | 99371221 | 99371471 | 0.608 |
| chr10 | 99444709 | 99444959 | 0.348 |
| chr10 | 100283039 | 100283289 | 0.336 |
| chr10 | 101099626 | 101099876 | 0.264 |
| chr10 | 101913511 | 101913761 | 0.348 |
| chr10 | 102718384 | 102718634 | 0.34 |
| chr10 | 103725234 | 103725484 | 0.348 |
| chr10 | 104591173 | 104591423 | 0.576 |
| chr10 | 104594996 | 104595246 | 0.568 |
| chr10 | 104595007 | 104595257 | 0.568 |
| chr10 | 104596713 | 104596963 | 0.532 |
| chr10 | 104596835 | 104597085 | 0.536 |
| chr10 | 104596913 | 104597163 | 0.552 |
| chr10 | 104816277 | 104816527 | 0.348 |
| chr10 | 105676155 | 105676405 | 0.348 |
| chr10 | 106811336 | 106811586 | 0.348 |
| chr10 | 107659600 | 107659850 | 0.304 |
| chr10 | 108512082 | 108512332 | 0.348 |
| chr10 | 109373152 | 109373402 | 0.348 |
| chr10 | 110180327 | 110180577 | 0.348 |
| chr10 | 110981331 | 110981581 | 0.348 |
| chr10 | 112590150 | 112590400 | 0.324 |
| chr10 | 113580385 | 113580635 | 0.348 |
| chr10 | 115419322 | 115419572 | 0.348 |
| chr10 | 116388354 | 116388604 | 0.276 |
| chr10 | 117195710 | 117195960 | 0.264 |
| chr10 | 118001417 | 118001667 | 0.348 |
| chr10 | 118804036 | 118804286 | 0.312 |
| chr10 | 119604589 | 119604839 | 0.348 |
| chr10 | 121415468 | 121415718 | 0.348 |
| chr10 | 122562221 | 122562471 | 0.344 |
| chr10 | 123467150 | 123467400 | 0.324 |
| chr10 | 124501500 | 124501750 | 0.348 |
| chr10 | 125600180 | 125600430 | 0.348 |
| chr10 | 126768584 | 126768834 | 0.348 |
| chr10 | 127706472 | 127706722 | 0.348 |
| chr10 | 128534329 | 128534579 | 0.348 |
| chr10 | 129334357 | 129334607 | 0.348 |
| chr10 | 130135711 | 130135961 | 0.348 |
| chr10 | 131363498 | 131363748 | 0.348 |
| chr10 | 132216150 | 132216400 | 0.316 |
| chr10 | 133163299 | 133163549 | 0.348 |
| chr10 | 133998082 | 133998332 | 0.348 |
| chr11 | 244145 | 244395 | 0.348 |
| chr11 | 1320632 | 1320882 | 0.348 |
| chr11 | 2819685 | 2819935 | 0.348 |
| chr11 | 3630780 | 3631030 | 0.312 |
| chr11 | 4437568 | 4437818 | 0.312 |
| chr11 | 5246865 | 5247108 | 0.465021 |
| chr11 | 5247849 | 5248045 | 0.540816 |
| chr11 | 5247863 | 5248085 | 0.531532 |
| chr11 | 5247979 | 5248198 | 0.511416 |
| chr11 | 5248145 | 5248333 | 0.510638 |
| chr11 | 5261108 | 5261358 | 0.348 |
| chr11 | 6415310 | 6415560 | 0.576 |
| chr11 | 6415651 | 6415901 | 0.604 |
| chr11 | 6444321 | 6444571 | 0.348 |
| chr11 | 7612590 | 7612840 | 0.348 |
| chr11 | 8563550 | 8563800 | 0.292 |
| chr11 | 9416225 | 9416475 | 0.348 |
| chr11 | 10216982 | 10217232 | 0.324 |
| chr11 | 11061166 | 11061416 | 0.344 |
| chr11 | 12380273 | 12380523 | 0.348 |
| chr11 | 13235472 | 13235722 | 0.348 |
| chr11 | 14037966 | 14038216 | 0.268 |
| chr11 | 14864472 | 14864722 | 0.308 |
| chr11 | 15678839 | 15679089 | 0.344 |
| chr11 | 16481891 | 16482141 | 0.32 |
| chr11 | 17299219 | 17299469 | 0.312 |
| chr11 | 18110459 | 18110709 | 0.316 |
| chr11 | 18956824 | 18957074 | 0.348 |
| chr11 | 19766011 | 19766261 | 0.348 |
| chr11 | 20882553 | 20882803 | 0.348 |
| chr11 | 21696859 | 21697109 | 0.348 |
| chr11 | 22498768 | 22499018 | 0.348 |
| chr11 | 23301963 | 23302213 | 0.328 |
| chr11 | 24105150 | 24105400 | 0.304 |
| chr11 | 25703491 | 25703741 | 0.348 |
| chr11 | 26517322 | 26517572 | 0.348 |
| chr11 | 27334775 | 27335025 | 0.332 |
| chr11 | 28364408 | 28364658 | 0.32 |
| chr11 | 29209327 | 29209577 | 0.348 |
| chr11 | 30166480 | 30166730 | 0.324 |
| chr11 | 31761546 | 31761796 | 0.348 |
| chr11 | 32622160 | 32622410 | 0.348 |
| chr11 | 33583297 | 33583547 | 0.348 |
| chr11 | 34970150 | 34970400 | 0.284 |
| chr11 | 35911282 | 35911532 | 0.348 |
| chr11 | 37092305 | 37092555 | 0.268 |
| chr11 | 37909582 | 37909832 | 0.348 |
| chr11 | 38712541 | 38712791 | 0.3 |
| chr11 | 39522829 | 39523079 | 0.348 |
| chr11 | 40714150 | 40714400 | 0.324 |
| chr11 | 41532238 | 41532488 | 0.348 |
| chr11 | 42571467 | 42571717 | 0.348 |
| chr11 | 43660553 | 43660803 | 0.336 |
| chr11 | 44580611 | 44580861 | 0.348 |
| chr11 | 45451636 | 45451886 | 0.32 |
| chr11 | 46261790 | 46262040 | 0.348 |
| chr11 | 47072439 | 47072689 | 0.348 |
| chr11 | 47879220 | 47879470 | 0.348 |
| chr11 | 49919350 | 49919600 | 0.344 |
| chr11 | 55082493 | 55082743 | 0.348 |
| chr11 | 56022150 | 56022400 | 0.336 |
| chr11 | 56842806 | 56843056 | 0.34 |
| chr11 | 57725394 | 57725644 | 0.348 |
| chr11 | 58526329 | 58526579 | 0.288 |
| chr11 | 59347634 | 59347884 | 0.34 |
| chr11 | 60158561 | 60158811 | 0.348 |
| chr11 | 61095547 | 61095797 | 0.312 |
| chr11 | 61940132 | 61940382 | 0.348 |
| chr11 | 62810381 | 62810631 | 0.348 |
| chr11 | 63633992 | 63634242 | 0.348 |
| chr11 | 64538602 | 64538852 | 0.348 |
| chr11 | 65827667 | 65827917 | 0.348 |
| chr11 | 66889179 | 66889429 | 0.348 |
| chr11 | 67837487 | 67837737 | 0.348 |
| chr11 | 68763563 | 68763813 | 0.348 |
| chr11 | 69829791 | 69830041 | 0.348 |
| chr11 | 70707409 | 70707659 | 0.348 |
| chr11 | 71743478 | 71743728 | 0.332 |
| chr11 | 72548958 | 72549208 | 0.348 |
| chr11 | 73427854 | 73428104 | 0.324 |
| chr11 | 74260390 | 74260640 | 0.32 |
| chr11 | 75308356 | 75308606 | 0.348 |
| chr11 | 76140267 | 76140517 | 0.348 |
| chr11 | 76942624 | 76942874 | 0.312 |
| chr11 | 77810095 | 77810345 | 0.348 |
| chr11 | 78638250 | 78638500 | 0.324 |
| chr11 | 79439911 | 79440161 | 0.336 |
| chr11 | 80667558 | 80667808 | 0.308 |
| chr11 | 81817150 | 81817400 | 0.3 |
| chr11 | 82620784 | 82621034 | 0.3 |
| chr11 | 83424544 | 83424794 | 0.348 |
| chr11 | 84581358 | 84581608 | 0.336 |
| chr11 | 85477260 | 85477510 | 0.348 |
| chr11 | 86731237 | 86731487 | 0.348 |
| chr11 | 87860240 | 87860490 | 0.348 |
| chr11 | 88900460 | 88900710 | 0.316 |
| chr11 | 89859383 | 89859633 | 0.348 |
| chr11 | 90678351 | 90678601 | 0.316 |
| chr11 | 91493550 | 91493800 | 0.328 |
| chr11 | 92523358 | 92523608 | 0.348 |
| chr11 | 93330704 | 93330954 | 0.348 |
| chr11 | 94966331 | 94966581 | 0.348 |
| chr11 | 95920272 | 95920522 | 0.348 |
| chr11 | 96726378 | 96726628 | 0.288 |
| chr11 | 97527417 | 97527667 | 0.324 |
| chr11 | 98344481 | 98344731 | 0.324 |
| chr11 | 99148179 | 99148429 | 0.348 |
| chr11 | 100371430 | 100371680 | 0.336 |
| chr11 | 101194937 | 101195187 | 0.348 |
| chr11 | 102003016 | 102003266 | 0.348 |
| chr11 | 102809148 | 102809398 | 0.332 |
| chr11 | 103620204 | 103620454 | 0.348 |
| chr11 | 104509150 | 104509400 | 0.328 |
| chr11 | 106310150 | 106310400 | 0.336 |
| chr11 | 107416442 | 107416692 | 0.348 |
| chr11 | 108154976 | 108155226 | 0.38 |
| chr11 | 108203436 | 108203686 | 0.34 |
| chr11 | 108419336 | 108419586 | 0.348 |
| chr11 | 109219928 | 109220178 | 0.348 |
| chr11 | 110346453 | 110346703 | 0.348 |
| chr11 | 111248566 | 111248816 | 0.348 |
| chr11 | 112099263 | 112099513 | 0.356 |
| chr11 | 112103776 | 112104026 | 0.392 |
| chr11 | 112103798 | 112104048 | 0.384 |
| chr11 | 112361216 | 112361466 | 0.348 |
| chr11 | 113186794 | 113187044 | 0.348 |
| chr11 | 114018172 | 114018422 | 0.348 |
| chr11 | 115212550 | 115212800 | 0.3 |
| chr11 | 116431362 | 116431612 | 0.348 |
| chr11 | 117338011 | 117338261 | 0.348 |
| chr11 | 118182107 | 118182357 | 0.32 |
| chr11 | 118895800 | 118896050 | 0.544 |
| chr11 | 118895869 | 118896119 | 0.552 |
| chr11 | 118895879 | 118896129 | 0.552 |
| chr11 | 119078108 | 119078358 | 0.348 |
| chr11 | 120178614 | 120178864 | 0.348 |
| chr11 | 121065150 | 121065400 | 0.316 |
| chr11 | 122640481 | 122640731 | 0.348 |
| chr11 | 123618251 | 123618501 | 0.336 |
| chr11 | 124545250 | 124545500 | 0.348 |
| chr11 | 125353052 | 125353302 | 0.348 |
| chr11 | 126357309 | 126357559 | 0.348 |
| chr11 | 127164952 | 127165202 | 0.348 |
| chr11 | 127969605 | 127969855 | 0.348 |
| chr11 | 130098150 | 130098400 | 0.332 |
| chr11 | 131496162 | 131496412 | 0.34 |
| chr11 | 132296933 | 132297183 | 0.348 |
| chr11 | 133138077 | 133138327 | 0.348 |
| chr11 | 133944178 | 133944428 | 0.336 |
| chr12 | 1010150 | 1010400 | 0.316 |
| chr12 | 2078150 | 2078400 | 0.316 |
| chr12 | 2998433 | 2998683 | 0.348 |
| chr12 | 3852150 | 3852400 | 0.312 |
| chr12 | 4652702 | 4652952 | 0.252 |
| chr12 | 5476654 | 5476904 | 0.348 |
| chr12 | 7509182 | 7509432 | 0.348 |
| chr12 | 8602743 | 8602993 | 0.344 |
| chr12 | 10532150 | 10532400 | 0.32 |
| chr12 | 11669397 | 11669647 | 0.348 |
| chr12 | 12624150 | 12624400 | 0.348 |
| chr12 | 14017296 | 14017546 | 0.348 |
| chr12 | 14825153 | 14825403 | 0.348 |
| chr12 | 15864451 | 15864701 | 0.348 |
| chr12 | 17209551 | 17209801 | 0.348 |
| chr12 | 18564576 | 18564826 | 0.348 |
| chr12 | 19368406 | 19368656 | 0.312 |
| chr12 | 20169044 | 20169294 | 0.336 |
| chr12 | 21809388 | 21809638 | 0.348 |
| chr12 | 23194150 | 23194400 | 0.324 |
| chr12 | 24378150 | 24378400 | 0.336 |
| chr12 | 25261150 | 25261400 | 0.252 |
| chr12 | 26222263 | 26222513 | 0.348 |
| chr12 | 27032150 | 27032400 | 0.296 |
| chr12 | 28065150 | 28065400 | 0.312 |
| chr12 | 28867298 | 28867548 | 0.344 |
| chr12 | 29672600 | 29672850 | 0.348 |
| chr12 | 30484504 | 30484754 | 0.348 |
| chr12 | 31354128 | 31354378 | 0.28 |
| chr12 | 32233641 | 32233891 | 0.348 |
| chr12 | 33035048 | 33035298 | 0.348 |
| chr12 | 33852725 | 33852975 | 0.316 |
| chr12 | 38762712 | 38762962 | 0.312 |
| chr12 | 39568259 | 39568509 | 0.348 |
| chr12 | 41547550 | 41547800 | 0.304 |
| chr12 | 42374550 | 42374800 | 0.324 |
| chr12 | 43286446 | 43286696 | 0.324 |
| chr12 | 44125571 | 44125821 | 0.324 |
| chr12 | 44928251 | 44928501 | 0.348 |
| chr12 | 45741587 | 45741837 | 0.28 |
| chr12 | 47018150 | 47018400 | 0.32 |
| chr12 | 47954368 | 47954618 | 0.348 |
| chr12 | 48807366 | 48807616 | 0.348 |
| chr12 | 49653664 | 49653914 | 0.348 |
| chr12 | 50552411 | 50552661 | 0.348 |
| chr12 | 51355238 | 51355488 | 0.348 |
| chr12 | 52156338 | 52156588 | 0.348 |
| chr12 | 53047852 | 53048102 | 0.348 |
| chr12 | 53867986 | 53868236 | 0.348 |
| chr12 | 54849331 | 54849581 | 0.348 |
| chr12 | 55967213 | 55967463 | 0.328 |
| chr12 | 57136531 | 57136781 | 0.324 |
| chr12 | 58191150 | 58191400 | 0.276 |
| chr12 | 59121159 | 59121409 | 0.348 |
| chr12 | 59962108 | 59962358 | 0.324 |
| chr12 | 60789979 | 60790229 | 0.252 |
| chr12 | 62345357 | 62345607 | 0.348 |
| chr12 | 63226154 | 63226404 | 0.348 |
| chr12 | 64269210 | 64269460 | 0.256 |
| chr12 | 65278150 | 65278400 | 0.308 |
| chr12 | 66088150 | 66088400 | 0.348 |
| chr12 | 67025166 | 67025416 | 0.324 |
| chr12 | 68088206 | 68088456 | 0.348 |
| chr12 | 68891849 | 68892099 | 0.348 |
| chr12 | 70321174 | 70321424 | 0.332 |
| chr12 | 71418451 | 71418701 | 0.348 |
| chr12 | 72312150 | 72312400 | 0.296 |
| chr12 | 73121298 | 73121548 | 0.268 |
| chr12 | 74229436 | 74229686 | 0.308 |
| chr12 | 75137472 | 75137722 | 0.304 |
| chr12 | 75942150 | 75942400 | 0.32 |
| chr12 | 76747550 | 76747800 | 0.312 |
| chr12 | 77549810 | 77550060 | 0.26 |
| chr12 | 79018196 | 79018446 | 0.348 |
| chr12 | 79819302 | 79819552 | 0.288 |
| chr12 | 80623713 | 80623963 | 0.332 |
| chr12 | 81432262 | 81432512 | 0.324 |
| chr12 | 82234916 | 82235166 | 0.26 |
| chr12 | 83040197 | 83040447 | 0.348 |
| chr12 | 83842541 | 83842791 | 0.348 |
| chr12 | 84644338 | 84644588 | 0.272 |
| chr12 | 86518150 | 86518400 | 0.344 |
| chr12 | 87422150 | 87422400 | 0.288 |
| chr12 | 88420350 | 88420600 | 0.348 |
| chr12 | 89430494 | 89430744 | 0.348 |
| chr12 | 90270282 | 90270532 | 0.348 |
| chr12 | 91174165 | 91174415 | 0.264 |
| chr12 | 92085151 | 92085401 | 0.348 |
| chr12 | 92947510 | 92947760 | 0.348 |
| chr12 | 93971575 | 93971825 | 0.348 |
| chr12 | 95097150 | 95097400 | 0.34 |
| chr12 | 96292457 | 96292707 | 0.336 |
| chr12 | 97672267 | 97672517 | 0.348 |
| chr12 | 98631302 | 98631552 | 0.348 |
| chr12 | 99884150 | 99884400 | 0.276 |
| chr12 | 101143158 | 101143408 | 0.348 |
| chr12 | 102015150 | 102015400 | 0.324 |
| chr12 | 103234177 | 103234426 | 0.46988 |
| chr12 | 103234235 | 103234340 | 0.504762 |
| chr12 | 103237341 | 103237591 | 0.512 |
| chr12 | 103237398 | 103237647 | 0.477912 |
| chr12 | 103237926 | 103238175 | 0.405622 |
| chr12 | 103240539 | 103240788 | 0.477912 |
| chr12 | 103245348 | 103245598 | 0.5 |
| chr12 | 103245355 | 103245604 | 0.497992 |
| chr12 | 103245396 | 103245646 | 0.456 |
| chr12 | 103246529 | 103246778 | 0.538153 |
| chr12 | 103248878 | 103249127 | 0.453815 |
| chr12 | 103248915 | 103249165 | 0.464 |
| chr12 | 103260367 | 103260616 | 0.445783 |
| chr12 | 103260384 | 103260490 | 0.45283 |
| chr12 | 103262150 | 103262400 | 0.304 |
| chr12 | 103271293 | 103271492 | 0.492462 |
| chr12 | 103288527 | 103288776 | 0.441767 |
| chr12 | 103306591 | 103306840 | 0.345382 |
| chr12 | 104098004 | 104098254 | 0.348 |
| chr12 | 106181481 | 106181731 | 0.344 |
| chr12 | 107176462 | 107176712 | 0.348 |
| chr12 | 108008885 | 108009135 | 0.348 |
| chr12 | 108830808 | 108831058 | 0.332 |
| chr12 | 109748594 | 109748844 | 0.348 |
| chr12 | 109994761 | 109995011 | 0.504 |
| chr12 | 109994805 | 109995055 | 0.48 |
| chr12 | 110555517 | 110555767 | 0.328 |
| chr12 | 111363237 | 111363487 | 0.308 |
| chr12 | 112247405 | 112247655 | 0.348 |
| chr12 | 113673150 | 113673400 | 0.292 |
| chr12 | 114525604 | 114525854 | 0.348 |
| chr12 | 115358313 | 115358563 | 0.34 |
| chr12 | 116191119 | 116191369 | 0.348 |
| chr12 | 117911938 | 117912188 | 0.312 |
| chr12 | 118730793 | 118731043 | 0.348 |
| chr12 | 119551405 | 119551655 | 0.348 |
| chr12 | 120405381 | 120405631 | 0.348 |
| chr12 | 121175612 | 121175862 | 0.628 |
| chr12 | 121176887 | 121177137 | 0.648 |
| chr12 | 121176999 | 121177249 | 0.64 |
| chr12 | 121210585 | 121210835 | 0.348 |
| chr12 | 122377840 | 122378090 | 0.252 |
| chr12 | 123239426 | 123239676 | 0.336 |
| chr12 | 124104421 | 124104671 | 0.348 |
| chr12 | 125045274 | 125045524 | 0.348 |
| chr12 | 125856241 | 125856491 | 0.348 |
| chr12 | 126656299 | 126656549 | 0.348 |
| chr12 | 128000199 | 128000449 | 0.348 |
| chr12 | 128945526 | 128945776 | 0.348 |
| chr12 | 129761193 | 129761443 | 0.348 |
| chr12 | 130586431 | 130586681 | 0.348 |
| chr12 | 131407236 | 131407486 | 0.348 |
| chr12 | 132208361 | 132208611 | 0.348 |
| chr12 | 133160778 | 133161028 | 0.348 |
| chr13 | 19509424 | 19509674 | 0.348 |
| chr13 | 20346157 | 20346407 | 0.344 |
| chr13 | 21163780 | 21164030 | 0.288 |
| chr13 | 21966517 | 21966767 | 0.332 |
| chr13 | 22769312 | 22769562 | 0.344 |
| chr13 | 23577459 | 23577709 | 0.336 |
| chr13 | 23909041 | 23909291 | 0.352 |
| chr13 | 23910386 | 23910636 | 0.392 |
| chr13 | 24381225 | 24381475 | 0.348 |
| chr13 | 25685243 | 25685493 | 0.324 |
| chr13 | 26952583 | 26952833 | 0.344 |
| chr13 | 28009207 | 28009457 | 0.348 |
| chr13 | 29040155 | 29040405 | 0.348 |
| chr13 | 30258409 | 30258659 | 0.348 |
| chr13 | 31078371 | 31078621 | 0.348 |
| chr13 | 31990150 | 31990400 | 0.328 |
| chr13 | 32794049 | 32794299 | 0.348 |
| chr13 | 33596179 | 33596429 | 0.316 |
| chr13 | 34427302 | 34427552 | 0.348 |
| chr13 | 35241150 | 35241400 | 0.328 |
| chr13 | 36047181 | 36047431 | 0.296 |
| chr13 | 36965545 | 36965795 | 0.348 |
| chr13 | 37907550 | 37907800 | 0.328 |
| chr13 | 38920435 | 38920685 | 0.348 |
| chr13 | 39771325 | 39771575 | 0.336 |
| chr13 | 40882353 | 40882603 | 0.348 |
| chr13 | 41765150 | 41765400 | 0.32 |
| chr13 | 42575249 | 42575499 | 0.344 |
| chr13 | 43379109 | 43379359 | 0.348 |
| chr13 | 44311168 | 44311418 | 0.348 |
| chr13 | 45121408 | 45121658 | 0.312 |
| chr13 | 46109150 | 46109400 | 0.332 |
| chr13 | 47732544 | 47732794 | 0.328 |
| chr13 | 48942150 | 48942400 | 0.268 |
| chr13 | 49742819 | 49743069 | 0.348 |
| chr13 | 50549888 | 50550138 | 0.332 |
| chr13 | 51354438 | 51354688 | 0.348 |
| chr13 | 52162009 | 52162259 | 0.348 |
| chr13 | 52966531 | 52966781 | 0.348 |
| chr13 | 53770557 | 53770807 | 0.344 |
| chr13 | 54575830 | 54576080 | 0.348 |
| chr13 | 55376257 | 55376507 | 0.332 |
| chr13 | 57034150 | 57034400 | 0.34 |
| chr13 | 58422150 | 58422400 | 0.28 |
| chr13 | 59588150 | 59588400 | 0.332 |
| chr13 | 60397150 | 60397400 | 0.312 |
| chr13 | 61202290 | 61202540 | 0.324 |
| chr13 | 62004633 | 62004883 | 0.272 |
| chr13 | 63351150 | 63351400 | 0.328 |
| chr13 | 64158420 | 64158670 | 0.288 |
| chr13 | 64958934 | 64959184 | 0.252 |
| chr13 | 65964404 | 65964654 | 0.316 |
| chr13 | 66764993 | 66765243 | 0.32 |
| chr13 | 67565742 | 67565992 | 0.268 |
| chr13 | 68592150 | 68592400 | 0.32 |
| chr13 | 69974172 | 69974422 | 0.26 |
| chr13 | 70774901 | 70775151 | 0.292 |
| chr13 | 71711150 | 71711400 | 0.336 |
| chr13 | 72600186 | 72600436 | 0.348 |
| chr13 | 73459222 | 73459472 | 0.324 |
| chr13 | 74546150 | 74546400 | 0.308 |
| chr13 | 75459380 | 75459630 | 0.3 |
| chr13 | 76488150 | 76488400 | 0.312 |
| chr13 | 77291150 | 77291400 | 0.332 |
| chr13 | 77574876 | 77575126 | 0.3 |
| chr13 | 77574930 | 77575180 | 0.304 |
| chr13 | 78107382 | 78107632 | 0.348 |
| chr13 | 79007255 | 79007505 | 0.348 |
| chr13 | 79813627 | 79813877 | 0.348 |
| chr13 | 80621943 | 80622193 | 0.348 |
| chr13 | 81803150 | 81803400 | 0.288 |
| chr13 | 83285173 | 83285423 | 0.348 |
| chr13 | 84093150 | 84093400 | 0.344 |
| chr13 | 85142259 | 85142509 | 0.348 |
| chr13 | 86482550 | 86482800 | 0.292 |
| chr13 | 87283355 | 87283605 | 0.252 |
| chr13 | 88107306 | 88107556 | 0.32 |
| chr13 | 88911884 | 88912134 | 0.348 |
| chr13 | 89717798 | 89718048 | 0.3 |
| chr13 | 90777553 | 90777803 | 0.348 |
| chr13 | 91581084 | 91581334 | 0.348 |
| chr13 | 92381844 | 92382094 | 0.348 |
| chr13 | 93184022 | 93184272 | 0.348 |
| chr13 | 93988458 | 93988708 | 0.348 |
| chr13 | 94864550 | 94864800 | 0.344 |
| chr13 | 95767550 | 95767800 | 0.324 |
| chr13 | 96598197 | 96598447 | 0.256 |
| chr13 | 97398760 | 97399010 | 0.284 |
| chr13 | 98206114 | 98206364 | 0.328 |
| chr13 | 99147389 | 99147639 | 0.348 |
| chr13 | 99953575 | 99953825 | 0.348 |
| chr13 | 100764123 | 100764373 | 0.312 |
| chr13 | 100925353 | 100925603 | 0.368 |
| chr13 | 101572024 | 101572274 | 0.348 |
| chr13 | 102372104 | 102372354 | 0.34 |
| chr13 | 104448504 | 104448754 | 0.348 |
| chr13 | 105811166 | 105811416 | 0.348 |
| chr13 | 106646233 | 106646483 | 0.348 |
| chr13 | 107819307 | 107819557 | 0.288 |
| chr13 | 108621182 | 108621432 | 0.348 |
| chr13 | 109437750 | 109438000 | 0.348 |
| chr13 | 110244948 | 110245198 | 0.348 |
| chr13 | 111045509 | 111045759 | 0.304 |
| chr13 | 111854189 | 111854439 | 0.348 |
| chr13 | 112657452 | 112657702 | 0.348 |
| chr13 | 113458943 | 113459193 | 0.308 |
| chr13 | 114266718 | 114266968 | 0.348 |
| chr13 | 115077515 | 115077765 | 0.348 |
| chr14 | 20331746 | 20331996 | 0.332 |
| chr14 | 20731811 | 20732061 | 0.348 |
| chr14 | 21156990 | 21157240 | 0.348 |
| chr14 | 21963671 | 21963921 | 0.348 |
| chr14 | 23243450 | 23243700 | 0.48 |
| chr14 | 23945665 | 23945915 | 0.348 |
| chr14 | 24728884 | 24729134 | 0.62 |
| chr14 | 24903163 | 24903413 | 0.312 |
| chr14 | 25341210 | 25341460 | 0.348 |
| chr14 | 26002455 | 26002705 | 0.416 |
| chr14 | 26015264 | 26015514 | 0.348 |
| chr14 | 27132386 | 27132636 | 0.348 |
| chr14 | 27988150 | 27988400 | 0.312 |
| chr14 | 28789081 | 28789331 | 0.252 |
| chr14 | 29592176 | 29592426 | 0.348 |
| chr14 | 30393187 | 30393437 | 0.284 |
| chr14 | 31195558 | 31195808 | 0.324 |
| chr14 | 31600116 | 31600366 | 0.324 |
| chr14 | 32004544 | 32004794 | 0.32 |
| chr14 | 32806096 | 32806346 | 0.348 |
| chr14 | 33607614 | 33607864 | 0.336 |
| chr14 | 34411885 | 34412135 | 0.312 |
| chr14 | 35218148 | 35218398 | 0.348 |
| chr14 | 35615486 | 35615736 | 0.324 |
| chr14 | 37299150 | 37299400 | 0.34 |
| chr14 | 38183150 | 38183400 | 0.256 |
| chr14 | 38989082 | 38989332 | 0.28 |
| chr14 | 39789090 | 39789340 | 0.252 |
| chr14 | 40589667 | 40589917 | 0.348 |
| chr14 | 40993988 | 40994238 | 0.312 |
| chr14 | 41393524 | 41393774 | 0.348 |
| chr14 | 43262940 | 43263190 | 0.312 |
| chr14 | 44065317 | 44065567 | 0.348 |
| chr14 | 44870813 | 44871063 | 0.264 |
| chr14 | 45277796 | 45278046 | 0.344 |
| chr14 | 45673230 | 45673480 | 0.284 |
| chr14 | 46798150 | 46798400 | 0.284 |
| chr14 | 48248386 | 48248636 | 0.348 |
| chr14 | 49055150 | 49055400 | 0.336 |
| chr14 | 49869097 | 49869347 | 0.328 |
| chr14 | 50693325 | 50693575 | 0.348 |
| chr14 | 51202151 | 51202401 | 0.348 |
| chr14 | 51710426 | 51710676 | 0.32 |
| chr14 | 53399150 | 53399400 | 0.292 |
| chr14 | 54325152 | 54325402 | 0.348 |
| chr14 | 55133584 | 55133834 | 0.348 |
| chr14 | 55954997 | 55955247 | 0.348 |
| chr14 | 56356037 | 56356287 | 0.348 |
| chr14 | 56757300 | 56757550 | 0.348 |
| chr14 | 57562963 | 57563213 | 0.348 |
| chr14 | 58448295 | 58448545 | 0.344 |
| chr14 | 59330150 | 59330400 | 0.316 |
| chr14 | 60137150 | 60137400 | 0.324 |
| chr14 | 61029567 | 61029817 | 0.312 |
| chr14 | 61831817 | 61832067 | 0.348 |
| chr14 | 62234974 | 62235224 | 0.348 |
| chr14 | 62648150 | 62648400 | 0.32 |
| chr14 | 63451150 | 63451400 | 0.34 |
| chr14 | 64679200 | 64679450 | 0.348 |
| chr14 | 65479421 | 65479671 | 0.348 |
| chr14 | 66291609 | 66291859 | 0.348 |
| chr14 | 66707755 | 66708005 | 0.348 |
| chr14 | 67099658 | 67099908 | 0.336 |
| chr14 | 67900455 | 67900705 | 0.328 |
| chr14 | 68191809 | 68192059 | 0.532 |
| chr14 | 68193588 | 68193838 | 0.572 |
| chr14 | 68193689 | 68193939 | 0.552 |
| chr14 | 68195776 | 68196026 | 0.584 |
| chr14 | 68706399 | 68706649 | 0.348 |
| chr14 | 69519728 | 69519978 | 0.348 |
| chr14 | 70427169 | 70427419 | 0.348 |
| chr14 | 71955192 | 71955442 | 0.324 |
| chr14 | 72369138 | 72369388 | 0.348 |
| chr14 | 72780476 | 72780726 | 0.348 |
| chr14 | 73583334 | 73583584 | 0.348 |
| chr14 | 74419912 | 74420162 | 0.348 |
| chr14 | 74947285 | 74947535 | 0.412 |
| chr14 | 74950993 | 74951243 | 0.484 |
| chr14 | 74952902 | 74953152 | 0.444 |
| chr14 | 74952982 | 74953232 | 0.472 |
| chr14 | 75231341 | 75231591 | 0.348 |
| chr14 | 76128102 | 76128352 | 0.348 |
| chr14 | 76717009 | 76717259 | 0.348 |
| chr14 | 77352577 | 77352827 | 0.348 |
| chr14 | 78858150 | 78858400 | 0.348 |
| chr14 | 79899295 | 79899545 | 0.348 |
| chr14 | 81000150 | 81000400 | 0.34 |
| chr14 | 81938150 | 81938400 | 0.332 |
| chr14 | 82739526 | 82739776 | 0.308 |
| chr14 | 83277489 | 83277739 | 0.348 |
| chr14 | 83828150 | 83828400 | 0.312 |
| chr14 | 84903229 | 84903479 | 0.348 |
| chr14 | 85751567 | 85751817 | 0.34 |
| chr14 | 86625529 | 86625779 | 0.348 |
| chr14 | 87501333 | 87501583 | 0.348 |
| chr14 | 88407748 | 88407998 | 0.368 |
| chr14 | 88413964 | 88414214 | 0.452 |
| chr14 | 88650507 | 88650757 | 0.348 |
| chr14 | 89060856 | 89061106 | 0.328 |
| chr14 | 89464609 | 89464859 | 0.348 |
| chr14 | 90271098 | 90271348 | 0.336 |
| chr14 | 91072033 | 91072283 | 0.348 |
| chr14 | 91876716 | 91876966 | 0.348 |
| chr14 | 93250166 | 93250416 | 0.348 |
| chr14 | 94052683 | 94052933 | 0.348 |
| chr14 | 94626755 | 94627005 | 0.348 |
| chr14 | 94844782 | 94845032 | 0.504 |
| chr14 | 94844822 | 94845072 | 0.544 |
| chr14 | 94849223 | 94849473 | 0.54 |
| chr14 | 94888492 | 94888742 | 0.316 |
| chr14 | 96231311 | 96231561 | 0.348 |
| chr14 | 97299482 | 97299732 | 0.312 |
| chr14 | 98110316 | 98110566 | 0.348 |
| chr14 | 98925215 | 98925465 | 0.348 |
| chr14 | 99322526 | 99322776 | 0.348 |
| chr14 | 99726035 | 99726285 | 0.348 |
| chr14 | 100695219 | 100695469 | 0.348 |
| chr14 | 101528862 | 101529112 | 0.348 |
| chr14 | 102342620 | 102342870 | 0.316 |
| chr14 | 103166071 | 103166321 | 0.348 |
| chr14 | 104199459 | 104199709 | 0.348 |
| chr14 | 104799911 | 104800161 | 0.348 |
| chr14 | 106327752 | 106328002 | 0.348 |
| chr15 | 21937192 | 21937442 | 0.348 |
| chr15 | 22815525 | 22815775 | 0.336 |
| chr15 | 23062275 | 23062525 | 0.348 |
| chr15 | 23805462 | 23805712 | 0.328 |
| chr15 | 24856221 | 24856471 | 0.348 |
| chr15 | 25256023 | 25256273 | 0.3 |
| chr15 | 25656926 | 25657176 | 0.336 |
| chr15 | 27756150 | 27756400 | 0.344 |
| chr15 | 28437259 | 28437509 | 0.348 |
| chr15 | 29143960 | 29144210 | 0.316 |
| chr15 | 29946126 | 29946376 | 0.308 |
| chr15 | 31338150 | 31338400 | 0.308 |
| chr15 | 32115541 | 32115791 | 0.348 |
| chr15 | 32928697 | 32928947 | 0.348 |
| chr15 | 33816249 | 33816499 | 0.348 |
| chr15 | 34418150 | 34418400 | 0.34 |
| chr15 | 34532737 | 34532986 | 0.457831 |
| chr15 | 34536054 | 34536236 | 0.412088 |
| chr15 | 35006335 | 35006585 | 0.348 |
| chr15 | 36298291 | 36298541 | 0.348 |
| chr15 | 36751553 | 36751803 | 0.348 |
| chr15 | 37098509 | 37098759 | 0.348 |
| chr15 | 38023487 | 38023737 | 0.348 |
| chr15 | 39315508 | 39315758 | 0.348 |
| chr15 | 39870231 | 39870481 | 0.348 |
| chr15 | 40677150 | 40677400 | 0.336 |
| chr15 | 40707528 | 40707778 | 0.552 |
| chr15 | 42054189 | 42054439 | 0.348 |
| chr15 | 42693828 | 42694078 | 0.58 |
| chr15 | 42703005 | 42703255 | 0.548 |
| chr15 | 42955175 | 42955425 | 0.348 |
| chr15 | 44096462 | 44096712 | 0.348 |
| chr15 | 44492018 | 44492268 | 0.348 |
| chr15 | 44898296 | 44898546 | 0.312 |
| chr15 | 45699464 | 45699714 | 0.348 |
| chr15 | 46502884 | 46503134 | 0.348 |
| chr15 | 47004873 | 47005123 | 0.304 |
| chr15 | 47506569 | 47506819 | 0.348 |
| chr15 | 48748150 | 48748400 | 0.336 |
| chr15 | 49239150 | 49239400 | 0.34 |
| chr15 | 49912448 | 49912698 | 0.348 |
| chr15 | 50717615 | 50717865 | 0.348 |
| chr15 | 51503082 | 51503332 | 0.444 |
| chr15 | 51503089 | 51503339 | 0.444 |
| chr15 | 51510606 | 51510856 | 0.38 |
| chr15 | 51510730 | 51510980 | 0.4 |
| chr15 | 51514421 | 51514671 | 0.452 |
| chr15 | 51528775 | 51529025 | 0.34 |
| chr15 | 51749584 | 51749834 | 0.348 |
| chr15 | 52375584 | 52375834 | 0.32 |
| chr15 | 53488150 | 53488400 | 0.28 |
| chr15 | 54303419 | 54303669 | 0.348 |
| chr15 | 55400166 | 55400416 | 0.348 |
| chr15 | 55947150 | 55947400 | 0.324 |
| chr15 | 56611250 | 56611500 | 0.332 |
| chr15 | 57552150 | 57552400 | 0.32 |
| chr15 | 58755932 | 58756182 | 0.348 |
| chr15 | 59168882 | 59169132 | 0.348 |
| chr15 | 60057234 | 60057484 | 0.296 |
| chr15 | 61399384 | 61399634 | 0.348 |
| chr15 | 62048550 | 62048800 | 0.32 |
| chr15 | 62410361 | 62410611 | 0.348 |
| chr15 | 63213584 | 63213834 | 0.348 |
| chr15 | 63624114 | 63624364 | 0.348 |
| chr15 | 64025256 | 64025506 | 0.348 |
| chr15 | 64840241 | 64840491 | 0.332 |
| chr15 | 65674276 | 65674526 | 0.34 |
| chr15 | 66097124 | 66097374 | 0.348 |
| chr15 | 66541083 | 66541333 | 0.348 |
| chr15 | 67364323 | 67364573 | 0.268 |
| chr15 | 68461235 | 68461485 | 0.348 |
| chr15 | 68501858 | 68502108 | 0.58 |
| chr15 | 68503470 | 68503720 | 0.588 |
| chr15 | 68504006 | 68504256 | 0.592 |
| chr15 | 68504067 | 68504317 | 0.604 |
| chr15 | 69405375 | 69405625 | 0.348 |
| chr15 | 69906737 | 69906987 | 0.348 |
| chr15 | 70261781 | 70262031 | 0.348 |
| chr15 | 71298502 | 71298752 | 0.316 |
| chr15 | 72129534 | 72129784 | 0.336 |
| chr15 | 72638860 | 72639056 | 0.515306 |
| chr15 | 72640258 | 72640508 | 0.544 |
| chr15 | 73399350 | 73399600 | 0.332 |
| chr15 | 74451150 | 74451400 | 0.324 |
| chr15 | 75189266 | 75189516 | 0.532 |
| chr15 | 75465113 | 75465363 | 0.348 |
| chr15 | 75869324 | 75869574 | 0.316 |
| chr15 | 76301292 | 76301542 | 0.284 |
| chr15 | 77750576 | 77750826 | 0.344 |
| chr15 | 78309918 | 78310168 | 0.34 |
| chr15 | 78565345 | 78565595 | 0.348 |
| chr15 | 80450387 | 80450637 | 0.508 |
| chr15 | 80465310 | 80465560 | 0.576 |
| chr15 | 80472405 | 80472655 | 0.64 |
| chr15 | 80472447 | 80472697 | 0.624 |
| chr15 | 80473260 | 80473510 | 0.536 |
| chr15 | 80730551 | 80730801 | 0.348 |
| chr15 | 80938280 | 80938530 | 0.348 |
| chr15 | 81549150 | 81549400 | 0.328 |
| chr15 | 82355082 | 82355332 | 0.348 |
| chr15 | 83783444 | 83783694 | 0.348 |
| chr15 | 84178159 | 84178409 | 0.348 |
| chr15 | 85189700 | 85189950 | 0.348 |
| chr15 | 86017842 | 86018092 | 0.284 |
| chr15 | 86446885 | 86447135 | 0.312 |
| chr15 | 86821668 | 86821918 | 0.348 |
| chr15 | 87865458 | 87865708 | 0.348 |
| chr15 | 88320038 | 88320288 | 0.348 |
| chr15 | 88810009 | 88810259 | 0.348 |
| chr15 | 89644678 | 89644928 | 0.348 |
| chr15 | 89753895 | 89754145 | 0.564 |
| chr15 | 89860637 | 89860887 | 0.532 |
| chr15 | 89862087 | 89862337 | 0.596 |
| chr15 | 89862159 | 89862409 | 0.536 |
| chr15 | 89864054 | 89864304 | 0.536 |
| chr15 | 89866532 | 89866782 | 0.572 |
| chr15 | 89868746 | 89868996 | 0.612 |
| chr15 | 89870087 | 89870337 | 0.58 |
| chr15 | 89873301 | 89873551 | 0.588 |
| chr15 | 89873358 | 89873608 | 0.6 |
| chr15 | 90992339 | 90992589 | 0.348 |
| chr15 | 91879321 | 91879571 | 0.348 |
| chr15 | 92283729 | 92283979 | 0.348 |
| chr15 | 92694222 | 92694472 | 0.34 |
| chr15 | 93494887 | 93495137 | 0.348 |
| chr15 | 94516150 | 94516400 | 0.272 |
| chr15 | 94738150 | 94738400 | 0.336 |
| chr15 | 95430150 | 95430400 | 0.34 |
| chr15 | 96242150 | 96242400 | 0.34 |
| chr15 | 97236279 | 97236529 | 0.348 |
| chr15 | 97542332 | 97542582 | 0.292 |
| chr15 | 98054150 | 98054400 | 0.332 |
| chr15 | 99928187 | 99928437 | 0.348 |
| chr15 | 101013180 | 101013430 | 0.348 |
| chr15 | 101227226 | 101227476 | 0.348 |
| chr15 | 101907373 | 101907623 | 0.348 |
| chr16 | 258208 | 258458 | 0.348 |
| chr16 | 946720 | 946970 | 0.348 |
| chr16 | 1413133 | 1413383 | 0.348 |
| chr16 | 2320307 | 2320557 | 0.348 |
| chr16 | 3293218 | 3293428 | 0.52381 |
| chr16 | 3293284 | 3293534 | 0.536 |
| chr16 | 3293312 | 3293561 | 0.558233 |
| chr16 | 3293322 | 3293572 | 0.548 |
| chr16 | 3293404 | 3293654 | 0.516 |
| chr16 | 3297026 | 3297276 | 0.584 |
| chr16 | 3297026 | 3297276 | 0.584 |
| chr16 | 3304577 | 3304735 | 0.702532 |
| chr16 | 3699883 | 3700133 | 0.348 |
| chr16 | 4062366 | 4062616 | 0.348 |
| chr16 | 4883448 | 4883698 | 0.348 |
| chr16 | 6227319 | 6227569 | 0.348 |
| chr16 | 6622150 | 6622400 | 0.28 |
| chr16 | 7509405 | 7509655 | 0.348 |
| chr16 | 8312670 | 8312920 | 0.348 |
| chr16 | 8941497 | 8941747 | 0.6 |
| chr16 | 9148517 | 9148767 | 0.348 |
| chr16 | 9553912 | 9554162 | 0.348 |
| chr16 | 9952565 | 9952815 | 0.348 |
| chr16 | 10814797 | 10815047 | 0.348 |
| chr16 | 11641822 | 11642072 | 0.348 |
| chr16 | 12060400 | 12060650 | 0.348 |
| chr16 | 12521810 | 12522060 | 0.348 |
| chr16 | 13341606 | 13341856 | 0.32 |
| chr16 | 14167801 | 14168051 | 0.308 |
| chr16 | 14604714 | 14604964 | 0.348 |
| chr16 | 15052738 | 15052988 | 0.348 |
| chr16 | 15959882 | 15960132 | 0.32 |
| chr16 | 16859878 | 16860128 | 0.348 |
| chr16 | 17663171 | 17663421 | 0.336 |
| chr16 | 18119811 | 18120061 | 0.344 |
| chr16 | 18799227 | 18799477 | 0.348 |
| chr16 | 19621285 | 19621535 | 0.348 |
| chr16 | 20620997 | 20621247 | 0.288 |
| chr16 | 21600723 | 21600973 | 0.308 |
| chr16 | 21995758 | 21996008 | 0.348 |
| chr16 | 22413441 | 22413691 | 0.32 |
| chr16 | 23252457 | 23252707 | 0.348 |
| chr16 | 24097792 | 24098042 | 0.348 |
| chr16 | 24552683 | 24552933 | 0.34 |
| chr16 | 24939654 | 24939904 | 0.304 |
| chr16 | 25759791 | 25760041 | 0.348 |
| chr16 | 26644833 | 26645083 | 0.348 |
| chr16 | 26964539 | 26964789 | 0.348 |
| chr16 | 27504199 | 27504449 | 0.348 |
| chr16 | 29806827 | 29807077 | 0.348 |
| chr16 | 30764038 | 30764288 | 0.348 |
| chr16 | 31200605 | 31200855 | 0.328 |
| chr16 | 31656295 | 31656545 | 0.348 |
| chr16 | 32622254 | 32622504 | 0.348 |
| chr16 | 34199349 | 34199599 | 0.34 |
| chr16 | 35039854 | 35040104 | 0.348 |
| chr16 | 46501463 | 46501713 | 0.348 |
| chr16 | 46860612 | 46860862 | 0.324 |
| chr16 | 47307020 | 47307270 | 0.348 |
| chr16 | 48123485 | 48123735 | 0.348 |
| chr16 | 48979520 | 48979770 | 0.348 |
| chr16 | 49409741 | 49409991 | 0.34 |
| chr16 | 49854234 | 49854484 | 0.348 |
| chr16 | 50777251 | 50777501 | 0.348 |
| chr16 | 51611803 | 51612053 | 0.348 |
| chr16 | 52521397 | 52521647 | 0.344 |
| chr16 | 53001263 | 53001513 | 0.312 |
| chr16 | 53933270 | 53933520 | 0.348 |
| chr16 | 54744744 | 54744994 | 0.348 |
| chr16 | 55560218 | 55560468 | 0.336 |
| chr16 | 55979882 | 55980132 | 0.348 |
| chr16 | 56438259 | 56438509 | 0.344 |
| chr16 | 56548274 | 56548524 | 0.384 |
| chr16 | 56548356 | 56548606 | 0.44 |
| chr16 | 56903881 | 56904131 | 0.628 |
| chr16 | 57242761 | 57243011 | 0.336 |
| chr16 | 58047908 | 58048158 | 0.32 |
| chr16 | 58439726 | 58439976 | 0.348 |
| chr16 | 58854106 | 58854356 | 0.348 |
| chr16 | 59723150 | 59723400 | 0.32 |
| chr16 | 60845346 | 60845596 | 0.348 |
| chr16 | 61360230 | 61360480 | 0.252 |
| chr16 | 61758472 | 61758722 | 0.348 |
| chr16 | 62727578 | 62727828 | 0.348 |
| chr16 | 63914255 | 63914505 | 0.328 |
| chr16 | 64454577 | 64454827 | 0.268 |
| chr16 | 64980267 | 64980517 | 0.348 |
| chr16 | 65805485 | 65805735 | 0.336 |
| chr16 | 66650107 | 66650357 | 0.348 |
| chr16 | 67124434 | 67124684 | 0.348 |
| chr16 | 67597956 | 67598206 | 0.348 |
| chr16 | 68432415 | 68432665 | 0.348 |
| chr16 | 69235387 | 69235637 | 0.324 |
| chr16 | 70192752 | 70193002 | 0.348 |
| chr16 | 70597322 | 70597572 | 0.348 |
| chr16 | 71206932 | 71207182 | 0.348 |
| chr16 | 72033345 | 72033595 | 0.348 |
| chr16 | 72837496 | 72837746 | 0.348 |
| chr16 | 73239267 | 73239517 | 0.348 |
| chr16 | 73642603 | 73642853 | 0.336 |
| chr16 | 74481276 | 74481526 | 0.348 |
| chr16 | 75327074 | 75327324 | 0.328 |
| chr16 | 75766225 | 75766475 | 0.344 |
| chr16 | 76259454 | 76259704 | 0.348 |
| chr16 | 77308495 | 77308745 | 0.312 |
| chr16 | 78168150 | 78168400 | 0.348 |
| chr16 | 78721550 | 78721800 | 0.344 |
| chr16 | 78979256 | 78979506 | 0.336 |
| chr16 | 79786137 | 79786387 | 0.348 |
| chr16 | 80589959 | 80590209 | 0.348 |
| chr16 | 81009953 | 81010203 | 0.348 |
| chr16 | 81411556 | 81411806 | 0.348 |
| chr16 | 82958335 | 82958585 | 0.348 |
| chr16 | 83829502 | 83829752 | 0.348 |
| chr16 | 84166382 | 84166632 | 0.336 |
| chr16 | 85076447 | 85076697 | 0.348 |
| chr16 | 85907481 | 85907731 | 0.32 |
| chr16 | 86714059 | 86714309 | 0.324 |
| chr16 | 87736388 | 87736638 | 0.348 |
| chr16 | 88097355 | 88097605 | 0.348 |
| chr16 | 89161654 | 89161904 | 0.348 |
| chr16 | 89849148 | 89849398 | 0.484 |
| chr16 | 89849164 | 89849414 | 0.492 |
| chr16 | 89877010 | 89877260 | 0.384 |
| chr17 | 465619 | 465869 | 0.476 |
| chr17 | 559153 | 559403 | 0.348 |
| chr17 | 879453 | 879703 | 0.348 |
| chr17 | 1455714 | 1455964 | 0.348 |
| chr17 | 2287357 | 2287607 | 0.348 |
| chr17 | 2588173 | 2588423 | 0.348 |
| chr17 | 3088772 | 3089022 | 0.284 |
| chr17 | 3563424 | 3563674 | 0.576 |
| chr17 | 3916884 | 3917134 | 0.308 |
| chr17 | 5011281 | 5011531 | 0.348 |
| chr17 | 5431814 | 5432064 | 0.348 |
| chr17 | 6026560 | 6026810 | 0.348 |
| chr17 | 6830537 | 6830787 | 0.336 |
| chr17 | 7128160 | 7128410 | 0.628 |
| chr17 | 7651065 | 7651315 | 0.348 |
| chr17 | 7918695 | 7918945 | 0.604 |
| chr17 | 8263781 | 8264031 | 0.344 |
| chr17 | 8461018 | 8461268 | 0.348 |
| chr17 | 9328553 | 9328803 | 0.304 |
| chr17 | 9787971 | 9788221 | 0.348 |
| chr17 | 10223454 | 10223704 | 0.348 |
| chr17 | 11055587 | 11055837 | 0.32 |
| chr17 | 11886166 | 11886416 | 0.324 |
| chr17 | 12278449 | 12278699 | 0.308 |
| chr17 | 12691155 | 12691405 | 0.348 |
| chr17 | 14005537 | 14005787 | 0.348 |
| chr17 | 15093150 | 15093400 | 0.34 |
| chr17 | 15416497 | 15416747 | 0.336 |
| chr17 | 15901623 | 15901873 | 0.348 |
| chr17 | 16781645 | 16781895 | 0.348 |
| chr17 | 17377934 | 17378184 | 0.348 |
| chr17 | 17818108 | 17818358 | 0.348 |
| chr17 | 18764031 | 18764281 | 0.348 |
| chr17 | 19566518 | 19566768 | 0.352 |
| chr17 | 19999381 | 19999631 | 0.336 |
| chr17 | 20209152 | 20209402 | 0.336 |
| chr17 | 20829712 | 20829962 | 0.348 |
| chr17 | 22025919 | 22026169 | 0.348 |
| chr17 | 25630230 | 25630480 | 0.348 |
| chr17 | 27580360 | 27580610 | 0.276 |
| chr17 | 28417566 | 28417816 | 0.348 |
| chr17 | 28819459 | 28819709 | 0.32 |
| chr17 | 29219615 | 29219865 | 0.332 |
| chr17 | 30219281 | 30219531 | 0.348 |
| chr17 | 30657441 | 30657691 | 0.348 |
| chr17 | 31020026 | 31020276 | 0.312 |
| chr17 | 31982636 | 31982886 | 0.348 |
| chr17 | 33771316 | 33771566 | 0.348 |
| chr17 | 34382478 | 34382728 | 0.3 |
| chr17 | 34823051 | 34823301 | 0.348 |
| chr17 | 35632575 | 35632825 | 0.328 |
| chr17 | 36513607 | 36513857 | 0.348 |
| chr17 | 36957600 | 36957850 | 0.348 |
| chr17 | 37409895 | 37410145 | 0.348 |
| chr17 | 38280124 | 38280374 | 0.348 |
| chr17 | 38783515 | 38783765 | 0.348 |
| chr17 | 39080566 | 39080816 | 0.336 |
| chr17 | 40004497 | 40004747 | 0.348 |
| chr17 | 40695364 | 40695614 | 0.64 |
| chr17 | 40695461 | 40695711 | 0.66 |
| chr17 | 40695588 | 40695838 | 0.62 |
| chr17 | 40695755 | 40696005 | 0.632 |
| chr17 | 40695920 | 40696170 | 0.584 |
| chr17 | 40961983 | 40962233 | 0.332 |
| chr17 | 41052842 | 41053092 | 0.496 |
| chr17 | 41052881 | 41053131 | 0.484 |
| chr17 | 41062968 | 41063218 | 0.536 |
| chr17 | 41063053 | 41063303 | 0.588 |
| chr17 | 41362685 | 41362935 | 0.324 |
| chr17 | 41843202 | 41843452 | 0.348 |
| chr17 | 42736824 | 42737074 | 0.28 |
| chr17 | 43767203 | 43767453 | 0.348 |
| chr17 | 44271724 | 44271974 | 0.348 |
| chr17 | 44787702 | 44787952 | 0.324 |
| chr17 | 45676520 | 45676770 | 0.308 |
| chr17 | 46151588 | 46151838 | 0.348 |
| chr17 | 46492183 | 46492433 | 0.348 |
| chr17 | 47368119 | 47368369 | 0.348 |
| chr17 | 48244905 | 48245155 | 0.652 |
| chr17 | 48500926 | 48501176 | 0.332 |
| chr17 | 48925318 | 48925568 | 0.348 |
| chr17 | 49302069 | 49302319 | 0.348 |
| chr17 | 50153263 | 50153513 | 0.348 |
| chr17 | 51249262 | 51249512 | 0.308 |
| chr17 | 51650684 | 51650934 | 0.348 |
| chr17 | 52050727 | 52050977 | 0.304 |
| chr17 | 53502160 | 53502410 | 0.348 |
| chr17 | 54154294 | 54154544 | 0.348 |
| chr17 | 54514376 | 54514626 | 0.348 |
| chr17 | 55667460 | 55667710 | 0.348 |
| chr17 | 56296396 | 56296646 | 0.64 |
| chr17 | 56469489 | 56469739 | 0.348 |
| chr17 | 57271861 | 57272111 | 0.348 |
| chr17 | 58119107 | 58119357 | 0.348 |
| chr17 | 58529289 | 58529539 | 0.332 |
| chr17 | 58934643 | 58934893 | 0.348 |
| chr17 | 59737150 | 59737400 | 0.316 |
| chr17 | 60644768 | 60645018 | 0.332 |
| chr17 | 61051969 | 61052219 | 0.32 |
| chr17 | 61464852 | 61465102 | 0.348 |
| chr17 | 62271111 | 62271361 | 0.348 |
| chr17 | 62645048 | 62645298 | 0.304 |
| chr17 | 63117102 | 63117352 | 0.284 |
| chr17 | 63926144 | 63926394 | 0.348 |
| chr17 | 64736660 | 64736910 | 0.348 |
| chr17 | 65689242 | 65689492 | 0.348 |
| chr17 | 66804590 | 66804840 | 0.348 |
| chr17 | 67242150 | 67242400 | 0.34 |
| chr17 | 68050397 | 68050647 | 0.296 |
| chr17 | 69063221 | 69063471 | 0.332 |
| chr17 | 69978262 | 69978512 | 0.348 |
| chr17 | 70909150 | 70909400 | 0.336 |
| chr17 | 71861764 | 71862014 | 0.332 |
| chr17 | 72572363 | 72572613 | 0.308 |
| chr17 | 73007683 | 73007933 | 0.348 |
| chr17 | 73941279 | 73941529 | 0.348 |
| chr17 | 74441215 | 74441465 | 0.348 |
| chr17 | 75094873 | 75095123 | 0.348 |
| chr17 | 75957718 | 75957968 | 0.348 |
| chr17 | 76771456 | 76771706 | 0.348 |
| chr17 | 77357842 | 77358092 | 0.348 |
| chr17 | 77749872 | 77750122 | 0.348 |
| chr17 | 78078272 | 78078499 | 0.647577 |
| chr17 | 78078810 | 78079059 | 0.666667 |
| chr17 | 78086683 | 78086876 | 0.65285 |
| chr17 | 78090765 | 78090952 | 0.647059 |
| chr17 | 78091969 | 78092218 | 0.662651 |
| chr17 | 78184281 | 78184531 | 0.668 |
| chr17 | 78184353 | 78184603 | 0.624 |
| chr17 | 78187505 | 78187755 | 0.692 |
| chr17 | 78187877 | 78188127 | 0.644 |
| chr17 | 78188311 | 78188561 | 0.632 |
| chr17 | 78188412 | 78188662 | 0.604 |
| chr17 | 78559453 | 78559703 | 0.324 |
| chr17 | 79870994 | 79871244 | 0.348 |
| chr17 | 80358326 | 80358576 | 0.348 |
| chr18 | 352317 | 352567 | 0.348 |
| chr18 | 1376361 | 1376611 | 0.348 |
| chr18 | 1780339 | 1780589 | 0.348 |
| chr18 | 2178416 | 2178666 | 0.348 |
| chr18 | 2981417 | 2981667 | 0.348 |
| chr18 | 3133377 | 3133627 | 0.348 |
| chr18 | 4041313 | 4041563 | 0.344 |
| chr18 | 5367216 | 5367466 | 0.348 |
| chr18 | 6171554 | 6171804 | 0.328 |
| chr18 | 6578629 | 6578879 | 0.348 |
| chr18 | 6977250 | 6977500 | 0.348 |
| chr18 | 8023198 | 8023448 | 0.348 |
| chr18 | 8257365 | 8257615 | 0.348 |
| chr18 | 9211150 | 9211400 | 0.308 |
| chr18 | 10066349 | 10066599 | 0.348 |
| chr18 | 10924564 | 10924814 | 0.332 |
| chr18 | 11728526 | 11728776 | 0.34 |
| chr18 | 12529626 | 12529876 | 0.312 |
| chr18 | 12968418 | 12968668 | 0.348 |
| chr18 | 13399720 | 13399970 | 0.348 |
| chr18 | 14932813 | 14933063 | 0.348 |
| chr18 | 18540358 | 18540608 | 0.316 |
| chr18 | 19342552 | 19342802 | 0.288 |
| chr18 | 20143679 | 20143929 | 0.348 |
| chr18 | 20957400 | 20957650 | 0.3 |
| chr18 | 21115324 | 21115574 | 0.5 |
| chr18 | 21115522 | 21115772 | 0.536 |
| chr18 | 21116575 | 21116825 | 0.52 |
| chr18 | 21118438 | 21118688 | 0.512 |
| chr18 | 21118490 | 21118740 | 0.508 |
| chr18 | 21119268 | 21119518 | 0.456 |
| chr18 | 21119662 | 21119912 | 0.524 |
| chr18 | 21119781 | 21120031 | 0.504 |
| chr18 | 21121194 | 21121444 | 0.484 |
| chr18 | 21136270 | 21136520 | 0.552 |
| chr18 | 21148788 | 21149038 | 0.368 |
| chr18 | 21501150 | 21501400 | 0.312 |
| chr18 | 22195155 | 22195405 | 0.34 |
| chr18 | 23350150 | 23350400 | 0.32 |
| chr18 | 24154458 | 24154708 | 0.348 |
| chr18 | 25617594 | 25617844 | 0.348 |
| chr18 | 26133235 | 26133485 | 0.276 |
| chr18 | 26944340 | 26944590 | 0.32 |
| chr18 | 27750063 | 27750313 | 0.328 |
| chr18 | 28150278 | 28150528 | 0.296 |
| chr18 | 28550925 | 28551175 | 0.308 |
| chr18 | 29794550 | 29794800 | 0.34 |
| chr18 | 30206170 | 30206420 | 0.348 |
| chr18 | 30617559 | 30617809 | 0.328 |
| chr18 | 32104550 | 32104800 | 0.312 |
| chr18 | 33485167 | 33485417 | 0.348 |
| chr18 | 34661394 | 34661644 | 0.324 |
| chr18 | 35818572 | 35818822 | 0.348 |
| chr18 | 36409564 | 36409814 | 0.348 |
| chr18 | 36817547 | 36817797 | 0.284 |
| chr18 | 37631150 | 37631400 | 0.336 |
| chr18 | 37749565 | 37749815 | 0.344 |
| chr18 | 38710272 | 38710522 | 0.348 |
| chr18 | 39747382 | 39747632 | 0.34 |
| chr18 | 40637226 | 40637476 | 0.348 |
| chr18 | 41439110 | 41439360 | 0.276 |
| chr18 | 41829773 | 41830023 | 0.348 |
| chr18 | 42239853 | 42240103 | 0.336 |
| chr18 | 43040497 | 43040747 | 0.348 |
| chr18 | 43843110 | 43843360 | 0.348 |
| chr18 | 44175715 | 44175965 | 0.348 |
| chr18 | 44654383 | 44654633 | 0.348 |
| chr18 | 45454440 | 45454690 | 0.348 |
| chr18 | 45933306 | 45933556 | 0.348 |
| chr18 | 46473309 | 46473559 | 0.348 |
| chr18 | 47313188 | 47313438 | 0.32 |
| chr18 | 48143536 | 48143786 | 0.34 |
| chr18 | 48537991 | 48538241 | 0.348 |
| chr18 | 48948147 | 48948397 | 0.348 |
| chr18 | 49765022 | 49765272 | 0.348 |
| chr18 | 50569985 | 50570235 | 0.336 |
| chr18 | 50977389 | 50977639 | 0.348 |
| chr18 | 51386182 | 51386432 | 0.344 |
| chr18 | 52359206 | 52359456 | 0.252 |
| chr18 | 53778557 | 53778807 | 0.348 |
| chr18 | 54396170 | 54396420 | 0.348 |
| chr18 | 55361574 | 55361824 | 0.348 |
| chr18 | 56168157 | 56168407 | 0.344 |
| chr18 | 56575500 | 56575750 | 0.348 |
| chr18 | 56969651 | 56969901 | 0.348 |
| chr18 | 58270587 | 58270837 | 0.252 |
| chr18 | 58864470 | 58864720 | 0.348 |
| chr18 | 59829150 | 59829400 | 0.324 |
| chr18 | 60629990 | 60630240 | 0.348 |
| chr18 | 61030027 | 61030277 | 0.348 |
| chr18 | 61430302 | 61430552 | 0.348 |
| chr18 | 62397150 | 62397400 | 0.332 |
| chr18 | 63197866 | 63198116 | 0.312 |
| chr18 | 63594781 | 63595031 | 0.324 |
| chr18 | 63997888 | 63998138 | 0.26 |
| chr18 | 64798724 | 64798974 | 0.348 |
| chr18 | 65202000 | 65202250 | 0.336 |
| chr18 | 65599811 | 65600061 | 0.288 |
| chr18 | 66403127 | 66403377 | 0.348 |
| chr18 | 67205175 | 67205425 | 0.288 |
| chr18 | 67611261 | 67611511 | 0.316 |
| chr18 | 68016661 | 68016911 | 0.344 |
| chr18 | 68818492 | 68818742 | 0.332 |
| chr18 | 69633509 | 69633759 | 0.348 |
| chr18 | 70029267 | 70029517 | 0.32 |
| chr18 | 70436499 | 70436749 | 0.348 |
| chr18 | 71240897 | 71241147 | 0.316 |
| chr18 | 71643656 | 71643906 | 0.324 |
| chr18 | 72045281 | 72045531 | 0.348 |
| chr18 | 74383168 | 74383418 | 0.348 |
| chr18 | 74798379 | 74798629 | 0.348 |
| chr18 | 75604856 | 75605106 | 0.288 |
| chr18 | 76965150 | 76965400 | 0.332 |
| chr18 | 77566578 | 77566828 | 0.348 |
| chr19 | 1364412 | 1364662 | 0.348 |
| chr19 | 2857080 | 2857330 | 0.348 |
| chr19 | 4423005 | 4423255 | 0.348 |
| chr19 | 5389785 | 5390035 | 0.348 |
| chr19 | 5612398 | 5612648 | 0.348 |
| chr19 | 6103129 | 6103379 | 0.348 |
| chr19 | 7182731 | 7182981 | 0.304 |
| chr19 | 8516971 | 8517221 | 0.348 |
| chr19 | 8923201 | 8923451 | 0.348 |
| chr19 | 9341186 | 9341436 | 0.348 |
| chr19 | 9581544 | 9581794 | 0.348 |
| chr19 | 10244002 | 10244252 | 0.344 |
| chr19 | 10677063 | 10677313 | 0.348 |
| chr19 | 10781045 | 10781295 | 0.348 |
| chr19 | 11199420 | 11199670 | 0.348 |
| chr19 | 11216102 | 11216211 | 0.59633 |
| chr19 | 11711517 | 11711767 | 0.348 |
| chr19 | 12105696 | 12105946 | 0.32 |
| chr19 | 12360810 | 12361060 | 0.296 |
| chr19 | 12625145 | 12625395 | 0.348 |
| chr19 | 13006933 | 13007183 | 0.612 |
| chr19 | 13007001 | 13007251 | 0.612 |
| chr19 | 13007639 | 13007889 | 0.612 |
| chr19 | 14730075 | 14730325 | 0.348 |
| chr19 | 15394044 | 15394294 | 0.348 |
| chr19 | 15860722 | 15860972 | 0.348 |
| chr19 | 16508380 | 16508630 | 0.344 |
| chr19 | 16737060 | 16737310 | 0.348 |
| chr19 | 16960936 | 16961186 | 0.3 |
| chr19 | 19135821 | 19136071 | 0.348 |
| chr19 | 19510651 | 19510901 | 0.348 |
| chr19 | 19952103 | 19952353 | 0.308 |
| chr19 | 20230842 | 20231092 | 0.336 |
| chr19 | 20462509 | 20462759 | 0.348 |
| chr19 | 21130690 | 21130940 | 0.284 |
| chr19 | 21131150 | 21131400 | 0.336 |
| chr19 | 21575132 | 21575382 | 0.348 |
| chr19 | 21961594 | 21961844 | 0.348 |
| chr19 | 22306026 | 22306276 | 0.34 |
| chr19 | 22764711 | 22764961 | 0.34 |
| chr19 | 23219468 | 23219718 | 0.268 |
| chr19 | 23594704 | 23594954 | 0.344 |
| chr19 | 23778748 | 23778998 | 0.344 |
| chr19 | 23985429 | 23985679 | 0.348 |
| chr19 | 24324202 | 24324452 | 0.288 |
| chr19 | 28272923 | 28273173 | 0.312 |
| chr19 | 28780463 | 28780713 | 0.348 |
| chr19 | 29320557 | 29320807 | 0.348 |
| chr19 | 29588492 | 29588742 | 0.348 |
| chr19 | 30033997 | 30034247 | 0.348 |
| chr19 | 30458220 | 30458470 | 0.348 |
| chr19 | 30892388 | 30892638 | 0.348 |
| chr19 | 31361227 | 31361477 | 0.348 |
| chr19 | 31763334 | 31763584 | 0.348 |
| chr19 | 32165641 | 32165891 | 0.348 |
| chr19 | 32560119 | 32560369 | 0.348 |
| chr19 | 32976483 | 32976733 | 0.312 |
| chr19 | 33350683 | 33350933 | 0.624 |
| chr19 | 33350754 | 33351004 | 0.592 |
| chr19 | 33354962 | 33355212 | 0.592 |
| chr19 | 33355018 | 33355268 | 0.58 |
| chr19 | 33413996 | 33414246 | 0.348 |
| chr19 | 33823022 | 33823272 | 0.348 |
| chr19 | 34284602 | 34284852 | 0.348 |
| chr19 | 34669651 | 34669901 | 0.336 |
| chr19 | 34965785 | 34966035 | 0.336 |
| chr19 | 35249399 | 35249649 | 0.348 |
| chr19 | 35605042 | 35605292 | 0.348 |
| chr19 | 36122870 | 36123120 | 0.348 |
| chr19 | 36322130 | 36322380 | 0.596 |
| chr19 | 36342381 | 36342631 | 0.656 |
| chr19 | 36727027 | 36727277 | 0.348 |
| chr19 | 37128748 | 37128998 | 0.288 |
| chr19 | 37563389 | 37563639 | 0.348 |
| chr19 | 37829474 | 37829724 | 0.34 |
| chr19 | 38122751 | 38123001 | 0.34 |
| chr19 | 38312990 | 38313240 | 0.344 |
| chr19 | 38681154 | 38681404 | 0.348 |
| chr19 | 38782852 | 38783102 | 0.348 |
| chr19 | 40029441 | 40029691 | 0.32 |
| chr19 | 40503907 | 40504157 | 0.348 |
| chr19 | 40632336 | 40632586 | 0.348 |
| chr19 | 40871180 | 40871430 | 0.348 |
| chr19 | 41799074 | 41799324 | 0.296 |
| chr19 | 41928413 | 41928663 | 0.6 |
| chr19 | 42144707 | 42144957 | 0.348 |
| chr19 | 43138347 | 43138597 | 0.348 |
| chr19 | 44349101 | 44349351 | 0.312 |
| chr19 | 44682330 | 44682580 | 0.348 |
| chr19 | 45059901 | 45060151 | 0.312 |
| chr19 | 46056772 | 46057022 | 0.7 |
| chr19 | 46102932 | 46103182 | 0.348 |
| chr19 | 46560162 | 46560412 | 0.348 |
| chr19 | 46954415 | 46954665 | 0.328 |
| chr19 | 47389774 | 47390024 | 0.348 |
| chr19 | 47692993 | 47693243 | 0.344 |
| chr19 | 48475123 | 48475373 | 0.316 |
| chr19 | 48764479 | 48764729 | 0.348 |
| chr19 | 50146477 | 50146727 | 0.348 |
| chr19 | 51713109 | 51713359 | 0.34 |
| chr19 | 52513511 | 52513761 | 0.288 |
| chr19 | 52920188 | 52920438 | 0.348 |
| chr19 | 53343345 | 53343595 | 0.348 |
| chr19 | 53669499 | 53669749 | 0.348 |
| chr19 | 54586305 | 54586555 | 0.3 |
| chr19 | 55068461 | 55068711 | 0.348 |
| chr19 | 55199832 | 55200082 | 0.348 |
| chr19 | 56219609 | 56219859 | 0.28 |
| chr19 | 56884255 | 56884505 | 0.316 |
| chr19 | 57437830 | 57438080 | 0.328 |
| chr19 | 58054419 | 58054669 | 0.316 |
| chr20 | 77170 | 77420 | 0.348 |
| chr20 | 519040 | 519290 | 0.32 |
| chr20 | 1147375 | 1147625 | 0.348 |
| chr20 | 1571446 | 1571696 | 0.348 |
| chr20 | 1947536 | 1947786 | 0.348 |
| chr20 | 2814622 | 2814872 | 0.348 |
| chr20 | 3211047 | 3211297 | 0.56 |
| chr20 | 3274903 | 3275153 | 0.348 |
| chr20 | 3631249 | 3631499 | 0.348 |
| chr20 | 3975347 | 3975597 | 0.348 |
| chr20 | 4449545 | 4449795 | 0.348 |
| chr20 | 5279681 | 5279931 | 0.348 |
| chr20 | 5753870 | 5754120 | 0.348 |
| chr20 | 6094874 | 6095124 | 0.328 |
| chr20 | 6498522 | 6498772 | 0.348 |
| chr20 | 6901553 | 6901803 | 0.348 |
| chr20 | 7729464 | 7729714 | 0.348 |
| chr20 | 8536150 | 8536400 | 0.324 |
| chr20 | 8928565 | 8928815 | 0.348 |
| chr20 | 9340986 | 9341236 | 0.344 |
| chr20 | 9740652 | 9740902 | 0.348 |
| chr20 | 10146600 | 10146850 | 0.348 |
| chr20 | 11388150 | 11388400 | 0.308 |
| chr20 | 11803150 | 11803400 | 0.336 |
| chr20 | 12195420 | 12195670 | 0.348 |
| chr20 | 12767453 | 12767703 | 0.348 |
| chr20 | 13141217 | 13141467 | 0.348 |
| chr20 | 13949320 | 13949570 | 0.348 |
| chr20 | 14353712 | 14353962 | 0.348 |
| chr20 | 14755112 | 14755362 | 0.348 |
| chr20 | 15359150 | 15359400 | 0.276 |
| chr20 | 15913249 | 15913499 | 0.296 |
| chr20 | 17347289 | 17347539 | 0.32 |
| chr20 | 17763020 | 17763270 | 0.348 |
| chr20 | 18167149 | 18167399 | 0.348 |
| chr20 | 18596512 | 18596762 | 0.348 |
| chr20 | 19409652 | 19409902 | 0.348 |
| chr20 | 19818614 | 19818864 | 0.308 |
| chr20 | 20210274 | 20210524 | 0.348 |
| chr20 | 20532551 | 20532801 | 0.324 |
| chr20 | 21026150 | 21026400 | 0.324 |
| chr20 | 21832473 | 21832723 | 0.348 |
| chr20 | 22237542 | 22237792 | 0.312 |
| chr20 | 22640479 | 22640729 | 0.324 |
| chr20 | 23060135 | 23060385 | 0.348 |
| chr20 | 23474780 | 23475030 | 0.34 |
| chr20 | 24275650 | 24275900 | 0.348 |
| chr20 | 24685964 | 24686214 | 0.308 |
| chr20 | 25109531 | 25109781 | 0.32 |
| chr20 | 25714681 | 25714931 | 0.296 |
| chr20 | 29847069 | 29847319 | 0.312 |
| chr20 | 30657384 | 30657634 | 0.336 |
| chr20 | 31291810 | 31292060 | 0.348 |
| chr20 | 31692805 | 31693055 | 0.348 |
| chr20 | 32588884 | 32589134 | 0.296 |
| chr20 | 32990720 | 32990970 | 0.336 |
| chr20 | 33396858 | 33397108 | 0.324 |
| chr20 | 33930796 | 33931046 | 0.332 |
| chr20 | 34021766 | 34022016 | 0.596 |
| chr20 | 34021782 | 34022032 | 0.596 |
| chr20 | 34021955 | 34022205 | 0.584 |
| chr20 | 34227958 | 34228208 | 0.348 |
| chr20 | 35300398 | 35300648 | 0.348 |
| chr20 | 35695232 | 35695482 | 0.348 |
| chr20 | 36150135 | 36150385 | 0.348 |
| chr20 | 36623218 | 36623468 | 0.348 |
| chr20 | 37117167 | 37117417 | 0.348 |
| chr20 | 37921224 | 37921474 | 0.348 |
| chr20 | 38322240 | 38322490 | 0.348 |
| chr20 | 38729196 | 38729446 | 0.348 |
| chr20 | 39510398 | 39510648 | 0.348 |
| chr20 | 40534390 | 40534640 | 0.348 |
| chr20 | 41411185 | 41411435 | 0.348 |
| chr20 | 41830566 | 41830816 | 0.348 |
| chr20 | 42275434 | 42275684 | 0.348 |
| chr20 | 42643867 | 42644117 | 0.348 |
| chr20 | 43115223 | 43115473 | 0.348 |
| chr20 | 43254061 | 43254311 | 0.676 |
| chr20 | 43254984 | 43255234 | 0.58 |
| chr20 | 44152521 | 44152771 | 0.348 |
| chr20 | 44496561 | 44496811 | 0.348 |
| chr20 | 44996290 | 44996540 | 0.348 |
| chr20 | 45529150 | 45529400 | 0.344 |
| chr20 | 45871441 | 45871691 | 0.348 |
| chr20 | 46844718 | 46844968 | 0.348 |
| chr20 | 47174893 | 47175143 | 0.348 |
| chr20 | 47650289 | 47650539 | 0.3 |
| chr20 | 47904517 | 47904767 | 0.348 |
| chr20 | 48480440 | 48480690 | 0.348 |
| chr20 | 49334830 | 49335080 | 0.348 |
| chr20 | 50145781 | 50146031 | 0.348 |
| chr20 | 50550520 | 50550770 | 0.34 |
| chr20 | 50950756 | 50951006 | 0.348 |
| chr20 | 51753303 | 51753553 | 0.336 |
| chr20 | 52324562 | 52324812 | 0.348 |
| chr20 | 53054192 | 53054442 | 0.348 |
| chr20 | 53454757 | 53455007 | 0.336 |
| chr20 | 53859987 | 53860237 | 0.348 |
| chr20 | 55091227 | 55091477 | 0.348 |
| chr20 | 55951837 | 55952087 | 0.324 |
| chr20 | 56403014 | 56403264 | 0.348 |
| chr20 | 57228245 | 57228495 | 0.348 |
| chr20 | 57694540 | 57694790 | 0.348 |
| chr20 | 58161403 | 58161653 | 0.348 |
| chr20 | 58567922 | 58568172 | 0.348 |
| chr20 | 58978600 | 58978850 | 0.348 |
| chr20 | 59778987 | 59779237 | 0.348 |
| chr20 | 60196684 | 60196934 | 0.348 |
| chr20 | 62318999 | 62319249 | 0.672 |
| chr20 | 62321379 | 62321629 | 0.624 |
| chr20 | 62326842 | 62327092 | 0.668 |
| chr20 | 62375183 | 62375433 | 0.348 |
| chr21 | 15481051 | 15481301 | 0.252 |
| chr21 | 15950150 | 15950400 | 0.344 |
| chr21 | 16081282 | 16081531 | 0.353414 |
| chr21 | 16206810 | 16207060 | 0.28 |
| chr21 | 16333315 | 16333564 | 0.381526 |
| chr21 | 16793392 | 16793642 | 0.348 |
| chr21 | 17135293 | 17135543 | 0.348 |
| chr21 | 17301983 | 17302232 | 0.381526 |
| chr21 | 17489798 | 17490048 | 0.296 |
| chr21 | 17695933 | 17696182 | 0.325301 |
| chr21 | 17823960 | 17824210 | 0.34 |
| chr21 | 17827150 | 17827400 | 0.344 |
| chr21 | 18229813 | 18230063 | 0.348 |
| chr21 | 18629909 | 18630159 | 0.348 |
| chr21 | 19024530 | 19024780 | 0.312 |
| chr21 | 19434035 | 19434285 | 0.348 |
| chr21 | 19707300 | 19707550 | 0.348 |
| chr21 | 20093300 | 20093550 | 0.276 |
| chr21 | 20474486 | 20474736 | 0.292 |
| chr21 | 20487286 | 20487536 | 0.264 |
| chr21 | 20890626 | 20890876 | 0.348 |
| chr21 | 21288139 | 21288389 | 0.348 |
| chr21 | 21685666 | 21685916 | 0.28 |
| chr21 | 22088785 | 22089035 | 0.348 |
| chr21 | 22490319 | 22490569 | 0.328 |
| chr21 | 22888860 | 22889110 | 0.328 |
| chr21 | 23136575 | 23136825 | 0.332 |
| chr21 | 23398370 | 23398620 | 0.268 |
| chr21 | 23827150 | 23827400 | 0.336 |
| chr21 | 24353533 | 24353783 | 0.3 |
| chr21 | 24895230 | 24895480 | 0.324 |
| chr21 | 25370366 | 25370616 | 0.348 |
| chr21 | 25689068 | 25689318 | 0.348 |
| chr21 | 26010566 | 26010816 | 0.308 |
| chr21 | 26339803 | 26340053 | 0.328 |
| chr21 | 26507298 | 26507547 | 0.353414 |
| chr21 | 26676239 | 26676489 | 0.348 |
| chr21 | 26969283 | 26969533 | 0.348 |
| chr21 | 27268386 | 27268636 | 0.348 |
| chr21 | 27520192 | 27520441 | 0.373494 |
| chr21 | 27761493 | 27761743 | 0.34 |
| chr21 | 28111207 | 28111457 | 0.32 |
| chr21 | 28291449 | 28291698 | 0.373494 |
| chr21 | 28420042 | 28420292 | 0.348 |
| chr21 | 28574819 | 28575068 | 0.369478 |
| chr21 | 28732222 | 28732472 | 0.316 |
| chr21 | 28919446 | 28919695 | 0.385542 |
| chr21 | 29085150 | 29085400 | 0.348 |
| chr21 | 29481927 | 29482177 | 0.256 |
| chr21 | 29886036 | 29886286 | 0.344 |
| chr21 | 30154482 | 30154732 | 0.348 |
| chr21 | 30301073 | 30301322 | 0.341365 |
| chr21 | 30415695 | 30415945 | 0.324 |
| chr21 | 30550132 | 30550381 | 0.349398 |
| chr21 | 30686458 | 30686708 | 0.34 |
| chr21 | 30810199 | 30810448 | 0.325301 |
| chr21 | 30956196 | 30956446 | 0.348 |
| chr21 | 31120815 | 31121064 | 0.341365 |
| chr21 | 31295615 | 31295865 | 0.312 |
| chr21 | 31494755 | 31495004 | 0.301205 |
| chr21 | 31631465 | 31631715 | 0.344 |
| chr21 | 31768996 | 31769245 | 0.309237 |
| chr21 | 31963626 | 31963876 | 0.284 |
| chr21 | 32291970 | 32292220 | 0.348 |
| chr21 | 32297150 | 32297400 | 0.324 |
| chr21 | 32704164 | 32704414 | 0.348 |
| chr21 | 33101826 | 33102076 | 0.348 |
| chr21 | 33555477 | 33555727 | 0.348 |
| chr21 | 33853735 | 33853983 | 0.310484 |
| chr21 | 33975120 | 33975370 | 0.348 |
| chr21 | 34142020 | 34142268 | 0.310484 |
| chr21 | 34381366 | 34381616 | 0.348 |
| chr21 | 34787647 | 34787897 | 0.348 |
| chr21 | 35034581 | 35034830 | 0.341365 |
| chr21 | 35210083 | 35210333 | 0.348 |
| chr21 | 35450331 | 35450580 | 0.401606 |
| chr21 | 35628286 | 35628536 | 0.348 |
| chr21 | 36049058 | 36049308 | 0.336 |
| chr21 | 36447052 | 36447302 | 0.292 |
| chr21 | 36789088 | 36789337 | 0.409639 |
| chr21 | 36929380 | 36929630 | 0.348 |
| chr21 | 37306439 | 37306689 | 0.348 |
| chr21 | 37620268 | 37620518 | 0.348 |
| chr21 | 37998204 | 37998454 | 0.276 |
| chr21 | 38267857 | 38268107 | 0.348 |
| chr21 | 38308910 | 38309160 | 0.532 |
| chr21 | 38537188 | 38537438 | 0.348 |
| chr21 | 39149737 | 39149987 | 0.348 |
| chr21 | 39442392 | 39442641 | 0.325301 |
| chr21 | 39679043 | 39679293 | 0.348 |
| chr21 | 39977160 | 39977409 | 0.413655 |
| chr21 | 40125556 | 40125806 | 0.348 |
| chr21 | 40427338 | 40427587 | 0.389558 |
| chr21 | 40759240 | 40759493 | 0.363636 |
| chr21 | 40972106 | 40972356 | 0.348 |
| chr21 | 41160090 | 41160343 | 0.359684 |
| chr21 | 41344027 | 41344277 | 0.348 |
| chr21 | 41592339 | 41592583 | 0.311475 |
| chr21 | 41767335 | 41767585 | 0.296 |
| chr21 | 42029142 | 42029391 | 0.393574 |
| chr21 | 42263335 | 42263585 | 0.292 |
| chr21 | 42729150 | 42729400 | 0.34 |
| chr21 | 43306231 | 43306481 | 0.348 |
| chr21 | 43667110 | 43667358 | 0.310484 |
| chr21 | 43883150 | 43883400 | 0.316 |
| chr21 | 44196371 | 44196621 | 0.348 |
| chr21 | 44424545 | 44424795 | 0.348 |
| chr21 | 44482314 | 44482564 | 0.652 |
| chr21 | 44482356 | 44482606 | 0.648 |
| chr21 | 44482953 | 44483203 | 0.636 |
| chr21 | 44483059 | 44483309 | 0.584 |
| chr21 | 44483916 | 44484166 | 0.604 |
| chr21 | 44485497 | 44485747 | 0.648 |
| chr21 | 44625010 | 44625260 | 0.348 |
| chr21 | 44948824 | 44949074 | 0.336 |
| chr21 | 45178504 | 45178754 | 0.348 |
| chr21 | 45472144 | 45472394 | 0.348 |
| chr21 | 45706431 | 45706681 | 0.636 |
| chr21 | 46000694 | 46000944 | 0.336 |
| chr21 | 46270689 | 46270939 | 0.348 |
| chr21 | 46533710 | 46533960 | 0.348 |
| chr21 | 46760919 | 46761169 | 0.348 |
| chr21 | 47065442 | 47065692 | 0.348 |
| chr22 | 17280474 | 17280724 | 0.3 |
| chr22 | 17413925 | 17414175 | 0.348 |
| chr22 | 17781671 | 17781921 | 0.348 |
| chr22 | 17935494 | 17935744 | 0.284 |
| chr22 | 18094028 | 18094278 | 0.344 |
| chr22 | 18344493 | 18344743 | 0.348 |
| chr22 | 18595330 | 18595580 | 0.348 |
| chr22 | 19219301 | 19219551 | 0.324 |
| chr22 | 19565525 | 19565775 | 0.348 |
| chr22 | 19766919 | 19767169 | 0.348 |
| chr22 | 19947592 | 19947842 | 0.348 |
| chr22 | 20817080 | 20817330 | 0.34 |
| chr22 | 21139822 | 21140072 | 0.348 |
| chr22 | 21292445 | 21292695 | 0.316 |
| chr22 | 22024679 | 22024929 | 0.34 |
| chr22 | 22438898 | 22439148 | 0.348 |
| chr22 | 22839744 | 22839994 | 0.348 |
| chr22 | 23278902 | 23279152 | 0.348 |
| chr22 | 24248051 | 24248301 | 0.348 |
| chr22 | 24718846 | 24719096 | 0.348 |
| chr22 | 25113444 | 25113694 | 0.252 |
| chr22 | 25588970 | 25589220 | 0.348 |
| chr22 | 25966386 | 25966636 | 0.348 |
| chr22 | 26120347 | 26120597 | 0.348 |
| chr22 | 26362974 | 26363224 | 0.348 |
| chr22 | 26769343 | 26769593 | 0.304 |
| chr22 | 26922260 | 26922510 | 0.348 |
| chr22 | 27163955 | 27164205 | 0.348 |
| chr22 | 27601162 | 27601412 | 0.284 |
| chr22 | 27994362 | 27994612 | 0.312 |
| chr22 | 28270441 | 28270691 | 0.348 |
| chr22 | 28446625 | 28446875 | 0.348 |
| chr22 | 28640282 | 28640532 | 0.348 |
| chr22 | 28820811 | 28821061 | 0.348 |
| chr22 | 29045556 | 29045806 | 0.284 |
| chr22 | 29395916 | 29396166 | 0.348 |
| chr22 | 29412378 | 29412628 | 0.348 |
| chr22 | 29826594 | 29826844 | 0.308 |
| chr22 | 30000222 | 30000472 | 0.348 |
| chr22 | 30257427 | 30257677 | 0.348 |
| chr22 | 30425284 | 30425534 | 0.348 |
| chr22 | 30587479 | 30587729 | 0.348 |
| chr22 | 31117594 | 31117844 | 0.336 |
| chr22 | 31392528 | 31392778 | 0.348 |
| chr22 | 31691832 | 31692082 | 0.348 |
| chr22 | 32113185 | 32113435 | 0.348 |
| chr22 | 32353173 | 32353423 | 0.348 |
| chr22 | 32505557 | 32505807 | 0.348 |
| chr22 | 32969346 | 32969596 | 0.348 |
| chr22 | 33257698 | 33257948 | 0.348 |
| chr22 | 33562806 | 33563056 | 0.348 |
| chr22 | 33590196 | 33590446 | 0.348 |
| chr22 | 34018923 | 34019173 | 0.348 |
| chr22 | 34236108 | 34236358 | 0.328 |
| chr22 | 34418259 | 34418509 | 0.348 |
| chr22 | 34803406 | 34803656 | 0.328 |
| chr22 | 35219092 | 35219342 | 0.348 |
| chr22 | 35677229 | 35677479 | 0.348 |
| chr22 | 36136285 | 36136535 | 0.348 |
| chr22 | 36340176 | 36340426 | 0.348 |
| chr22 | 36559863 | 36560113 | 0.348 |
| chr22 | 36958950 | 36959200 | 0.288 |
| chr22 | 37366224 | 37366474 | 0.292 |
| chr22 | 38615284 | 38615534 | 0.348 |
| chr22 | 38882398 | 38882648 | 0.348 |
| chr22 | 39066577 | 39066827 | 0.268 |
| chr22 | 39483473 | 39483723 | 0.348 |
| chr22 | 39913116 | 39913366 | 0.348 |
| chr22 | 40285123 | 40285373 | 0.348 |
| chr22 | 40441816 | 40442066 | 0.348 |
| chr22 | 40724377 | 40724627 | 0.348 |
| chr22 | 40928202 | 40928452 | 0.348 |
| chr22 | 41164700 | 41164950 | 0.3 |
| chr22 | 41570976 | 41571226 | 0.34 |
| chr22 | 42031998 | 42032248 | 0.336 |
| chr22 | 42253945 | 42254195 | 0.348 |
| chr22 | 43414341 | 43414591 | 0.328 |
| chr22 | 43819506 | 43819756 | 0.348 |
| chr22 | 44083042 | 44083292 | 0.348 |
| chr22 | 44213665 | 44213915 | 0.348 |
| chr22 | 44359248 | 44359498 | 0.348 |
| chr22 | 44852852 | 44853102 | 0.348 |
| chr22 | 45225408 | 45225658 | 0.348 |
| chr22 | 45545508 | 45545758 | 0.312 |
| chr22 | 45714432 | 45714682 | 0.348 |
| chr22 | 46038547 | 46038797 | 0.348 |
| chr22 | 46231545 | 46231795 | 0.348 |
| chr22 | 46456342 | 46456592 | 0.344 |
| chr22 | 46757150 | 46757400 | 0.344 |
| chr22 | 46988693 | 46988943 | 0.348 |
| chr22 | 47288440 | 47288690 | 0.348 |
| chr22 | 47643065 | 47643315 | 0.348 |
| chr22 | 48053341 | 48053591 | 0.348 |
| chr22 | 48217987 | 48218237 | 0.348 |
| chr22 | 48451914 | 48452164 | 0.348 |
| chr22 | 48864259 | 48864509 | 0.316 |
| chr22 | 49252506 | 49252756 | 0.348 |
| chr22 | 49500880 | 49501130 | 0.348 |
| chr22 | 49668127 | 49668377 | 0.348 |
| chr22 | 50072698 | 50072948 | 0.348 |
| chr22 | 50281645 | 50281895 | 0.348 |
| chr22 | 50523016 | 50523266 | 0.62 |
| chr22 | 50523047 | 50523297 | 0.648 |
| chr22 | 50558794 | 50559044 | 0.348 |
| chr22 | 50979168 | 50979418 | 0.332 |
| chr22 | 51063685 | 51063935 | 0.632 |
| chr22 | 51063716 | 51063966 | 0.652 |
| chr22 | 51063856 | 51064106 | 0.636 |
| chr22 | 51064009 | 51064259 | 0.64 |
| chr22 | 51064554 | 51064804 | 0.636 |
| chr22 | 51064921 | 51065171 | 0.62 |
| chr22 | 51065196 | 51065446 | 0.644 |
| chr22 | 51065453 | 51065703 | 0.68 |
| chr22 | 51065622 | 51065872 | 0.692 |
| chr22 | 51065688 | 51065938 | 0.656 |
| chrX | 2653932 | 2654182 | 0.548 |
| chrX | 2770647 | 2770897 | 0.348 |
| chrX | 3968150 | 3968400 | 0.312 |
| chrX | 4779861 | 4780111 | 0.348 |
| chrX | 5885150 | 5885400 | 0.344 |
| chrX | 7690150 | 7690400 | 0.316 |
| chrX | 8539329 | 8539579 | 0.292 |
| chrX | 9558559 | 9558809 | 0.32 |
| chrX | 10440260 | 10440510 | 0.348 |
| chrX | 11270150 | 11270400 | 0.344 |
| chrX | 12084550 | 12084800 | 0.312 |
| chrX | 13139540 | 13139790 | 0.348 |
| chrX | 14033255 | 14033505 | 0.348 |
| chrX | 15180150 | 15180400 | 0.344 |
| chrX | 16478150 | 16478400 | 0.316 |
| chrX | 17543222 | 17543472 | 0.32 |
| chrX | 18343366 | 18343616 | 0.32 |
| chrX | 19620578 | 19620828 | 0.348 |
| chrX | 20660335 | 20660585 | 0.348 |
| chrX | 21600150 | 21600400 | 0.34 |
| chrX | 22488497 | 22488747 | 0.348 |
| chrX | 23421185 | 23421435 | 0.348 |
| chrX | 24286150 | 24286400 | 0.312 |
| chrX | 25225575 | 25225825 | 0.348 |
| chrX | 26415364 | 26415614 | 0.348 |
| chrX | 27442376 | 27442626 | 0.316 |
| chrX | 28358150 | 28358400 | 0.312 |
| chrX | 29322235 | 29322485 | 0.348 |
| chrX | 30143185 | 30143435 | 0.348 |
| chrX | 31244468 | 31244718 | 0.344 |
| chrX | 32330150 | 32330400 | 0.296 |
| chrX | 33207324 | 33207574 | 0.308 |
| chrX | 34080150 | 34080400 | 0.332 |
| chrX | 34915259 | 34915509 | 0.344 |
| chrX | 35745301 | 35745551 | 0.32 |
| chrX | 36960179 | 36960429 | 0.348 |
| chrX | 37778455 | 37778705 | 0.34 |
| chrX | 38654560 | 38654810 | 0.312 |
| chrX | 39492888 | 39493138 | 0.348 |
| chrX | 40403451 | 40403701 | 0.348 |
| chrX | 41413158 | 41413408 | 0.348 |
| chrX | 42505150 | 42505400 | 0.34 |
| chrX | 43341210 | 43341460 | 0.348 |
| chrX | 44349185 | 44349435 | 0.34 |
| chrX | 45184425 | 45184675 | 0.348 |
| chrX | 46580312 | 46580562 | 0.344 |
| chrX | 47466548 | 47466798 | 0.348 |
| chrX | 48435008 | 48435258 | 0.348 |
| chrX | 49458818 | 49459068 | 0.328 |
| chrX | 50267179 | 50267429 | 0.348 |
| chrX | 51169150 | 51169400 | 0.324 |
| chrX | 51984557 | 51984807 | 0.316 |
| chrX | 52850579 | 52850829 | 0.348 |
| chrX | 53651747 | 53651997 | 0.348 |
| chrX | 54703818 | 54704068 | 0.332 |
| chrX | 56115356 | 56115606 | 0.348 |
| chrX | 56993967 | 56994217 | 0.348 |
| chrX | 57799496 | 57799746 | 0.348 |
| chrX | 62058452 | 62058702 | 0.348 |
| chrX | 63165214 | 63165464 | 0.344 |
| chrX | 63970645 | 63970895 | 0.344 |
| chrX | 64917421 | 64917671 | 0.348 |
| chrX | 65735342 | 65735592 | 0.348 |
| chrX | 66564534 | 66564784 | 0.348 |
| chrX | 67367876 | 67368126 | 0.348 |
| chrX | 68232212 | 68232462 | 0.348 |
| chrX | 69033716 | 69033966 | 0.348 |
| chrX | 69844167 | 69844417 | 0.344 |
| chrX | 71427432 | 71427682 | 0.348 |
| chrX | 72458405 | 72458655 | 0.348 |
| chrX | 73325904 | 73326154 | 0.348 |
| chrX | 74137571 | 74137821 | 0.348 |
| chrX | 75450150 | 75450400 | 0.304 |
| chrX | 76759150 | 76759400 | 0.324 |
| chrX | 77931150 | 77931400 | 0.344 |
| chrX | 78819276 | 78819526 | 0.348 |
| chrX | 79927150 | 79927400 | 0.292 |
| chrX | 80748375 | 80748625 | 0.3 |
| chrX | 81551352 | 81551602 | 0.296 |
| chrX | 82359761 | 82360011 | 0.296 |
| chrX | 83477290 | 83477540 | 0.28 |
| chrX | 84366205 | 84366455 | 0.256 |
| chrX | 85465150 | 85465400 | 0.288 |
| chrX | 86318150 | 86318400 | 0.316 |
| chrX | 87144287 | 87144537 | 0.292 |
| chrX | 87968502 | 87968752 | 0.284 |
| chrX | 89282095 | 89282345 | 0.344 |
| chrX | 90302716 | 90302966 | 0.288 |
| chrX | 91429162 | 91429412 | 0.32 |
| chrX | 92438331 | 92438581 | 0.288 |
| chrX | 93246796 | 93247046 | 0.32 |
| chrX | 94085648 | 94085898 | 0.304 |
| chrX | 94891150 | 94891400 | 0.276 |
| chrX | 95711217 | 95711467 | 0.348 |
| chrX | 96648150 | 96648400 | 0.348 |
| chrX | 9741150 | 97471400 | 0.328 |
| chrX | 98557428 | 98557678 | 0.348 |
| chrX | 99863553 | 99863803 | 0.348 |
| chrX | 102182150 | 102182400 | 0.28 |
| chrX | 102990468 | 102990718 | 0.34 |
| chrX | 104258320 | 104258570 | 0.348 |
| chrX | 105096264 | 105096514 | 0.348 |
| chrX | 105974498 | 105974748 | 0.324 |
| chrX | 106776228 | 106776478 | 0.348 |
| chrX | 107581900 | 107582150 | 0.348 |
| chrX | 108432389 | 108432639 | 0.348 |
| chrX | 109447214 | 109447464 | 0.348 |
| chrX | 110387150 | 110387400 | 0.344 |
| chrX | 111297150 | 111297400 | 0.324 |
| chrX | 112213179 | 112213429 | 0.328 |
| chrX | 113024257 | 113024507 | 0.34 |
| chrX | 114142520 | 114142770 | 0.348 |
| chrX | 115476183 | 115476433 | 0.348 |
| chrX | 116479598 | 116479848 | 0.292 |
| chrX | 117493202 | 117493452 | 0.328 |
| chrX | 118384548 | 118384798 | 0.348 |
| chrX | 119427212 | 119427462 | 0.348 |
| chrX | 120380150 | 120380400 | 0.348 |
| chrX | 121219432 | 121219682 | 0.276 |
| chrX | 122166150 | 122166400 | 0.308 |
| chrX | 122994558 | 122994808 | 0.348 |
| chrX | 123971391 | 123971641 | 0.348 |
| chrX | 125186473 | 125186723 | 0.332 |
| chrX | 126046357 | 126046607 | 0.348 |
| chrX | 126855255 | 126855505 | 0.332 |
| chrX | 127687504 | 127687754 | 0.348 |
| chrX | 128495196 | 128495446 | 0.348 |
| chrX | 129596551 | 129596801 | 0.348 |
| chrX | 130429675 | 130429925 | 0.34 |
| chrX | 131260508 | 131260758 | 0.348 |
| chrX | 132208598 | 132208848 | 0.348 |
| chrX | 133010150 | 133010400 | 0.344 |
| chrX | 133923287 | 133923537 | 0.348 |
| chrX | 135091150 | 135091400 | 0.332 |
| chrX | 136037150 | 136037400 | 0.328 |
| chrX | 136863150 | 136863400 | 0.324 |
| chrX | 137744150 | 137744400 | 0.328 |
| chrX | 138579590 | 138579840 | 0.336 |
| chrX | 139824185 | 139824435 | 0.348 |
| chrX | 140904478 | 140904728 | 0.316 |
| chrX | 141983247 | 141983497 | 0.348 |
| chrX | 142791108 | 142791358 | 0.344 |
| chrX | 143621663 | 143621913 | 0.348 |
| chrX | 144958182 | 144958432 | 0.348 |
| chrX | 145759329 | 145759579 | 0.344 |
| chrX | 146589192 | 146589442 | 0.348 |
| chrX | 147591150 | 147591400 | 0.344 |
| chrX | 148452186 | 148452436 | 0.348 |
| chrX | 149357308 | 149357558 | 0.348 |
| chrX | 150240045 | 150240295 | 0.348 |
| chrX | 151043387 | 151043637 | 0.348 |
| chrX | 152016983 | 152017233 | 0.348 |
| chrX | 153113554 | 153113804 | 0.348 |
| chrX | 154180278 | 154180528 | 0.348 |
| chrY | 2660772 | 2661021 | 0.361446 |
| chrY | 2710538 | 2710787 | 0.445783 |
| chrY | 2818858 | 2819107 | 0.37751 |
| chrY | 2831578 | 2831827 | 0.349398 |
| chrY | 2846524 | 2846773 | 0.329317 |
| chrY | 2903702 | 2903952 | 0.3 |
| chrY | 3713664 | 3713914 | 0.312 |
| chrY | 6592835 | 6593085 | 0.348 |
| chrY | 6785795 | 6786044 | 0.433735 |
| chrY | 6991732 | 6991982 | 0.348 |
| chrY | 7619930 | 7620180 | 0.328 |
| chrY | 7628101 | 7628351 | 0.34 |
| chrY | 7645822 | 7646072 | 0.288 |
| chrY | 7655666 | 7655916 | 0.348 |
| chrY | 7859013 | 7859263 | 0.348 |
| chrY | 8234092 | 8234342 | 0.348 |
| chrY | 8843984 | 8844234 | 0.324 |
| chrY | 9004092 | 9004341 | 0.405622 |
| chrY | 9415984 | 9416234 | 0.332 |
| chrY | 9894154 | 9894404 | 0.328 |
| chrY | 14188444 | 14188694 | 0.336 |
| chrY | 14638059 | 14638309 | 0.348 |
| chrY | 15017843 | 15018092 | 0.445783 |
| chrY | 15021516 | 15021765 | 0.35743 |
| chrY | 15473334 | 15473583 | 0.353414 |
| chrY | 15819282 | 15819532 | 0.348 |
| chrY | 16228505 | 16228755 | 0.348 |
| chrY | 16629874 | 16630124 | 0.348 |
| chrY | 16837863 | 16838110 | 0.376518 |
| chrY | 17030033 | 17030283 | 0.296 |
| chrY | 17232877 | 17233127 | 0.308 |
| chrY | 17234803 | 17235053 | 0.308 |
| chrY | 17236192 | 17236442 | 0.288 |
| chrY | 17456632 | 17456882 | 0.348 |
| chrY | 17852621 | 17852871 | 0.304 |
| chrY | 18264936 | 18265186 | 0.308 |
| chrY | 18676622 | 18676872 | 0.304 |
| chrY | 18884770 | 18885020 | 0.3 |
| chrY | 19086733 | 19086983 | 0.348 |
| chrY | 19287757 | 19288007 | 0.348 |
| chrY | 19317270 | 19317520 | 0.348 |
| chrY | 19321140 | 19321390 | 0.28 |
| chrY | 19336515 | 19336765 | 0.348 |
| chrY | 19343744 | 19343994 | 0.308 |
| chrY | 19345482 | 19345732 | 0.348 |
| chrY | 19551092 | 19551342 | 0.34 |
| chrY | 20807527 | 20807777 | 0.34 |
| chrY | 21231948 | 21232198 | 0.328 |
| chrY | 21617999 | 21618249 | 0.304 |
| chrY | 21825259 | 21825509 | 0.34 |
| chrY | 21870303 | 21870553 | 0.348 |
| chrY | 21882430 | 21882680 | 0.348 |
| chrY | 21889152 | 21889402 | 0.312 |
| chrY | 21892914 | 21893164 | 0.336 |
| chrY | 21896890 | 21897140 | 0.308 |
| chrY | 22098161 | 22098411 | 0.252 |
| chrY | 22519572 | 22519822 | 0.28 |
| chrY | 22923958 | 22924208 | 0.348 |
| chrY | 23365875 | 23366125 | 0.344 |
| chrY | 23594574 | 23594824 | 0.348 |
| chrY | 23598786 | 23599036 | 0.32 |
| chrY | 23770609 | 23770859 | 0.348 |
| chrY | 23772351 | 23772601 | 0.344 |

### DETAILED DESCRIPTION

[0052] The invention pertains to a method for analyzing genetic abnormalities that involves hybridization-based enrichment of selected target regions across the human genome in a multiplexed panel assay, followed by quantification, coupled with a novel bioinformatics and mathematical analysis pipeline. An overview of the method is shown schematically in FIG. 1.

[0053] In-solution hybridization enrichment has been used in the past to enrich specific regions of interest prior to sequencing (see e.g., Meyer, M and Kirchner, M. (2010) Cold Spring Harb. Protoc. 2010(6):pdbprot5448; Liao, G. J. et al. (2012) PLoS One 7:e38154; Maricic, T. et al. (2010) PLoS One 5:e14004; Tewhey, R. et al. (2009) Genome Biol. 10:R116; Tsangaras, K. et al. (2014) PLoS One 9:e109101; PCT Publication WO 2016/189388; US Patent Publication 2016/0340733; Koumbaris, G. et al. (2015) Clinical chemistry, 62(6), pp. 848-855). However, for the methods of the invention, the target sequences (referred to as TArget Capture Sequences, or TACS) used to enrich for specific regions of interest have been optimized for maximum efficiency, specificity and accuracy and, furthermore, allow for analysis of very small starting amounts of fetal or embryonic DNA in samples containing only or predominantly fetal or embryonic DNA.

[0054] Furthermore, in certain embodiments, the TACS used in the methods are families of TACS, comprising a plurality of members that bind to the same genomic sequence but with differing start and/or stop positions, such that enrichment of the genomic sequences of interest is significantly improved compared to use of a single TACS binding to the genomic sequence. The configuration of such families of TACS is illustrated schematically in FIG. 3, showing that the different start and/or stop positions of the members of the TACS family when bound to the genomic sequence of interest results in a staggered binding pattern for the family members.

[0055] The use of families of TACS with the TACS pool that bind to each target sequence of interest, as compared to use of a single TACS within the TACS pool that binds to each target sequence of interest, significantly increases enrichment for the target sequences of interest, as evidenced by a greater than 50% average increase in read-depth for the family of TACS versus a single TACS. Comparison of use of a family of TACS versus a single TACS, and the significantly improved read-depth that was observed, is described in detail in Example 5.

### Analysis of Fetal/Embryonic DNA Samples

[0056] The methods and kits of the disclosure are used in the analysis of fetal or embryonic DNA samples, e.g., for the presence of genetic abnormalities, for example for purposes of IVF Pre-implantation Genetic Screening (PGS) and Diagnosis (PGD). Accordingly, in the methods of the invention, the DNA sample comprises predominantly or only fetal or embryonic DNA. The methods can be used with samples from a single or only a few fetal or embryonic cells. As used herein “a few” fetal or embryonic cells refers to 10 fetal or embryonic cells or less. Accordingly, the methods allow for analysis of very small amounts of fetal or embryonic DNA. The fetal or embryonic DNA sample contains predominantly or only fetal/embryonic DNA, described further below in the subsection on sample preparation. An exemplification of use of the method with samples from 3-day and 5-day biopsy embryos is described in Example 6.

[0057] Accordingly, in one aspect, the invention pertains to a method of testing for risk of a genetic abnormality in a DNA sample comprising predominantly fetal or embryonic DNA and comprising genomic sequences of interest, the method comprising:
[0058] (a) preparing a sequencing library from the DNA sample comprising predominantly fetal or embryonic DNA;
[0059] (b) hybridizing the sequencing library to a pool of double-stranded TArget Capture Sequences (TACS), wherein the pool of TACS comprises sequences that bind to one or more genomic sequences of interest comprising a genetic abnormality;
[0060] (c) isolating members of the sequencing library that bind to the pool of TACS to obtain an enriched library;
[0061] (d) amplifying and sequencing the enriched library; and
[0062] (e) performing statistical analysis on the enriched library sequences to thereby determine risk of a genetic abnormality in the DNA sample.

[0063] In one embodiment:
[0064] (i) each member sequence within the pool of TACS is between 100-500 base pairs in length, each member sequence having a 5′ end and a 3′ end;
[0065] (ii) each member sequence binds to the same genomic sequence of interest at least 50 base pairs away, on both the 5′ end and the 3′ end, from regions harboring Copy Number Variations (CNVs), Segmental duplications or repetitive DNA elements; and
[0066] (iii) the GC content of the pool of TACS is between 19% and 80%, as determined by calculating the GC content of each member within the pool of TACS.

[0067] In one embodiment, the pool of TACS comprises a plurality of TACS families, wherein each member of a TACS family binds to the same target sequence of interest but with different start and/or stop positions on the sequence with respect to a reference coordinate system (i.e., binding of TACS family members to the target sequence is staggered) to thereby enrich for target sequences of interest, followed by massive parallel sequencing and statistical analysis of the enriched population. The use of families of TACS with the TACS pool that bind to each target sequence of interest, as compared to use of a single TACS within the TACS pool that binds to each target sequence of interest, significantly increases enrichment for the target sequences of interest, as evidenced by a greater than 50% average increase in read-depth for the family of TACS versus a single TACS.

[0068] Accordingly, in one embodiment, the pool of TACS comprises a plurality of TACS families directed to different genomic sequences of interest, wherein each TACS family comprises a plurality of member sequences, wherein each member sequence binds to the same genomic sequence of interest but has different start and/or stop positions with respect to a reference coordinate system for the genomic sequence of interest.

[0069] Thus, in another aspect, the invention pertains to a method of testing for risk of a genetic abnormality in a DNA sample comprising predominantly fetal or embryonic DNA and comprising genomic sequences of interest, the method comprising:
[0070] (a) preparing a sequencing library from the DNA sample comprising predominantly fetal or embryonic DNA;
[0071] (b) hybridizing the sequencing library to a pool of double-stranded TArget Capture Sequences (TACS), wherein the pool of TACS comprises a plurality of TACS families directed to different genomic sequences of interest, wherein each TACS family comprises a plurality of member sequences, wherein each member sequence binds to the same genomic sequence of interest but has different start and/or stop positions with respect to a reference coordinate system for the genomic sequence of interest;
[0072] (c) isolating members of the sequencing library that bind to the pool of TACS to obtain an enriched library;
[0073] (d) amplifying and sequencing the enriched library; and
[0074] (e) performing statistical analysis on the enriched library sequences to thereby determine risk of a genetic abnormality in the DNA sample.

[0075] In one embodiment,
[0076] (i) each member sequence within each TACS family is between 100-500 base pairs in length, each member sequence having a 5′ end and a 3′ end;
[0077] (ii) each member sequence binds to the same genomic sequence of interest at least 50 base pairs away, on both the 5′ end and the 3′ end, from regions harboring Copy Number Variations (CNVs), Segmental duplications or repetitive DNA elements; and
[0078] (iii) the GC content of the pool of TACS is between 19% and 80%, as determined by calculating the GC content of each member within each family of TACS.

[0079] The TACS-enrichment based method of the disclosure can be used in the detection of a wide variety of genetic abnormalities. In one embodiment, the genetic abnormality is a chromosomal aneuploidy (such as a trisomy, a partial trisomy or a monosomy). In other embodiments, the genomic abnormality is a structural abnormality, including but not limited to copy number changes including microdeletions and microduplications, insertions, translocations, inversions and small-size mutations including point mutations and mutational signatures. In another embodiment, the genetic abnormality is a chromosomal mosaicism.

### TArget Capture Sequence Design

[0080] As used herein, the term “TArget Capture Sequences” or “TACS” refers to short DNA sequences that are complementary to the region(s) of interest on a genomic sequence(s) of interest (e.g., chromosome(s) of interest) and which are used as “bait” to capture and enrich the region of interest from a large library of sequences, such as a whole genomic sequencing library prepared from a biological sample. A pool of TACS is used for enrichment wherein the sequences within the pool have been optimized with regard to: (i) the length of the sequences; (ii) the distribution of the TACS across the region(s) of interest; and (iii) the GC content of the TACS. The number of sequences within the TACS pool (pool size) has also been optimized.

[0081] It has been discovered that TACS having a length of 100-500 base pairs are optimal to maximize enrichment efficiency. In various other embodiments, each sequence within the pool of TACS is between 150-260 base pairs, 100-200 base pairs, 200-260 base pairs, 100-350 bp in length, or 100-500 bp in length. In preferred embodiments, the length of the TACS within the pool is at least 250 base pairs, or is 250 base pairs or is 260 base pairs or is 280 base pairs. It will be appreciated by the ordinarily skilled artisan that a slight variation in TACS size typically can be used without altering the results (e.g., the addition or deletion of a few base pairs on either end of the TACS); accordingly, the base pair lengths given herein are to be considered “about” or “approximate”, allowing for some slight variation (e.g., 1-5%) in length. Thus, for example, a length of “250 base pairs” is intended to refer to “about 250 base pairs” or “approximately 250 base pairs”, such that, for example, 248 or 252 base pairs is also encompassed.

[0082] The distribution of the TACS across each region or chromosome of interest has been optimized to avoid high copy repeats, low copy repeats and copy number variants, while at the same time also being able to target informative single nucleotide polymorphisms (SNPs) in order to enable both aneuploidy, or structural copy number change detection, and fetal fraction (ff) estimation. Accordingly, each sequence within the TACS pool is designed such that the 5′ end and the 3′ end are each at least 50 base pairs away from regions in the genome that are known to harbour one or more of the following genomic elements: Copy Number Variations (CNVs), Segmental duplications and/or repetitive DNA elements (such as transposable elements or tandem repeat areas). In various other embodiments, each sequence within the TACS pool is designed such that the 5′ end and the 3′ end are each at least 50, 100, 150, 200, 250, 300, 400 or 500 base pairs away from regions in the genome that are known to harbour one or more of the aforementioned elements.

[0083] The term “Copy Number Variations” is a term of art that refers to a form of structural variation in the human genome in which there can be alterations in the DNA of the genome in different individuals that can result in a fewer or greater than normal number of a section(s) of the genome in certain individuals. CNVs correspond to relatively large regions of the genome that may be deleted (e.g., a section that normally is A-B-C-D can be A-B-D) or may be duplicated (e.g., a section that normally is A-B-C-D can be A-B-C-C-D). CNVs account for roughly 13% of the human genome, with each variation ranging in size from about 1 kilobase to several megabases in size.

[0084] The term “Segmental duplications” (also known as “low-copy repeats”) is also a term of art that refers to blocks of DNA that range from about 1 to 400 kilobases in length that occur at more than one site within the genome and typically share a high level (greater than 90%) of sequence identity. Segmental duplications are reviewed in, for example, Eichler. E. E. (2001) Trends Genet. 17:661-669.

[0085] The term “repetitive DNA elements” (also known as “repeat DNA” or “repeated DNA”) is also a term of art that refers to patterns of DNA that occur in multiple copies throughout the genome. The term “repetitive DNA element” encompasses terminal repeats, tandem repeats and interspersed repeats, including transposable elements. Repetitive DNA elements in NGS is discussed further in, for example, Todd, J. et al. (2012) Nature Reviews Genet. 13:36-46.

[0086] The TACS are designed with specific GC content characteristics in order to minimize data GC bias and to allow a custom and innovative data analysis pipeline. It has been determined that TACS with a GC content of 19-80% achieve optimal enrichment and perform best with cell free fetal DNA. Within the pool of TACS, different sequences can have different % GC content, although to be selected for inclusion with the pool, the % GC content of each sequence is chosen as between 19-80%, as determined by calculating the GC content of each member within the pool of TACS or within each family of TACS. That is, every member within the pool or within each family of TACS in the pool has a % GC content within the given percentage range (e.g., between 19-80% GC content).

[0087] In some instances, the pool of TACS (e.g., each member within each family of TACS) may be chosen so as to define a different % GC content range, deemed to be more suitable for the assessment of specific genetic abnormalities. Non-limiting examples of various % GC content ranges, can be between 19% and 80%, or between 19% and 79%, or between 19% and 78%, or between 19% and 77%, or between 19% and 76%, or between 19% and 75%, or between 19% and 74%, or between 19% and 73%, or between 19% and 72%, or between 19% and 71%, or between 19% and 70%, or between 19% and 69%, or between 19% and 68%, or between 19% and 67%, or between 19% and 66%, or between 19% and 65%, or between 19% and 64%, or between 19% and 63%, or between 19% and 62%, or between 19% and 61%, or between 19% and 60%, or between 19% and 59%, or between 19% and 58%, or between 19% and 57%, or between 19% and 56%, or between 19% and 55%, or between 19% and 54%, or between 19% and 53%, or between 19% and 52%, or between 19% and 51%, or between 19% and 50%, or between 19% and 49%, or between 19% and 48%, or between 19% and 47%, or between 19% and 46%, or between 19% and 45%, or between 19% and 44%, or between 19% and 43%, or between 19% and 42%, or between 19% and 41%, or between 19% and 40%.

[0088] As described in further detail below with respect to one embodiment of the data analysis, following amplification and sequencing of the enriched sequences, the test loci and reference loci can then be “matched” or grouped together according to their % GC content (e.g., test loci with a % GC content of 40% is matched with reference loci with a % GC content of 40%). It is appreciated that the % GC content matching procedure may allow slight variation in the allowed matched % GC range. A non-limiting instance, and with reference to the previously described example in text, a test locus with % GC content of 40% could be matched with reference loci of % GC ranging from 39-41%, thereby encompassing the test locus % GC within a suitable range.

[0089] To prepare a pool of TACS having the optimized criteria set forth above with respect to size, placement within the human genome and % GC content, both manual and computerized analysis methods known in the art can be applied to the analysis of the human reference genome. In one embodiment, a semi-automatic method is implemented where regions are firstly manually designed based on the human reference genome build 19 (hg19) ensuring that the aforementioned repetitive regions are avoided and subsequently are curated for GC-content using software that computes the % GC-content of each region based on its coordinates on the human reference genome build 19 (hg19). In another embodiment, custom-built software is used to analyze the human reference genome in order to identify suitable TACS regions that fulfill certain criteria, such as but not limited to, % GC content, proximity to repetitive regions and/or proximity to other TACS.

[0090] The number of TACS in the pool has been carefully examined and adjusted to achieve the best balance between result robustness and assay cost/throughput. The pool typically contains at least 800 or more TACS, but can include more, such as 1500 or more TACS, 2000 or more TACS or 2500 or more TACS or 3500 or more TACS or 5000 or more TACS. It has been found that an optimal number of TACS in the pool is 5000. It will be appreciated by the ordinarily skilled artisan that a slight variation in pool size typically can be used without altering the results (e.g., the addition or removal of a small number of TACS); accordingly, the number sizes of the pool given herein are to be considered “about” or “approximate”, allowing for some slight variation (e.g., 1-5%) in size. Thus, for example, a pool size of “1600 sequences” is intended to refer to “about 1600 sequences” or “approximately 1600 sequences”, such that, for example, 1590 or 1610 sequences is also encompassed.

[0091] In view of the foregoing, in another aspect, the invention provides a method for preparing a pool of TACS for use in the method of the invention for detecting risk of a chromosomal and/or other genetic abnormality, wherein the method for preparing the pool of TACS comprises: selecting regions in one or more chromosomes of interest having the criteria set forth above (e.g., at least 50 base pairs away on either end from the aforementioned repetitive sequences and a GC content of between 19% and 80%, as determined by calculating the GC content of each member within each family of TACS), preparing primers that amplify sequences that hybridize to the selected regions, and amplifying the sequences, wherein each sequence is 100-500 base pairs in length.

[0092] For use in the methods of the disclosure, the pool of TACS typically is fixed to a solid support, such as beads (such as magnetic beads) or a column. In one embodiment, the pool of TACS are labeled with biotin and are bound to magnetic beads coated with a biotin-binding substance, such as streptavidin or avidin, to thereby fix the pool of TACS to a solid support. Other suitable binding systems for fixing the pool of TACS to a solid support (such as beads or column) are known to the skilled artisan and readily available in the art. When magnetic beads are used as the solid support, sequences that bind to the TACS affixed to the beads can be separated magnetically from those sequences that do not bind to the TACS.

### Families of TACS

[0093] In one embodiment, the pool of TACS comprises a plurality of TACS families directed to different genomic sequences of interest. Each TACS family comprises a plurality of members that bind to the same genomic sequence of interest but having different start and/or stop positions with respect to a reference coordinate system for the genomic sequence of interest. Typically, the reference coordinate system that is used for analyzing human genomic DNA is the human reference genome built hg19, which is publically available in the art, but other coordinate systems may also be used. Alternatively, the reference coordinate system can be an artificially created genome based on built hg19 that contains only the genomic sequences of interest. Exemplary non-limiting examples of start/stop positions for TACS that bind to chromosome 13, 18, 21, X or Y are shown in FIG. 2.

[0094] Each TACS family comprises at least 2 members that bind to the same genomic sequence of interest. In various embodiments, each TACS family comprises at least 2 member sequences, or at least 3 member sequences, or at least 4 member sequences, or at least 5 member sequences, or at least 6 member sequences, or at least 7 member sequences, or at least 8 member sequence, or at least 9 member sequences, or at least 10 member sequences. In various embodiments, each TACS family comprises 2 member sequences, or 3 member sequences, or 4 member sequences, or 5 member sequences, or 6 member sequences, or 7 member sequences, or 8 member sequences, or 9 member sequences, or 10 member sequences. In various embodiments, the plurality of TACS families comprises different families having different numbers of member sequences. For example, a pool of TACS can comprise one TACS family that comprises 3 member sequences, another TACS family that comprises 4 member sequences, and yet anotherTACS family that comprises 5 member sequences, and the like. In one embodiment, a TACS family comprises 3-5 member sequences. In another embodiment, the TACS family comprises 4 member sequences.

[0095] The pool of TACS comprises a plurality of TACS families. Thus, a pool of TACS comprises at least 2 TACS families. In various embodiments, a pool of TACS comprises at least 3 different TACS families, or at least 5 different TACS families, or at least 10 different TACS families, or at least 50 different TACS families, or at least 100 different TACS families, or at least 500 different TACS families, or at least 1000 different TACS families, or at least 2000 TACS families, or at least 4000 TACS families, or at least 5000 TACS families.

[0096] Each member within a family of TACS binds to the same genomic region of interest but with different start and/or stop positions, with respect to a reference coordinate system for the genomic sequence of interest, such that the binding pattern of the members of the TACS family is staggered (see FIG. 3). In various embodiments, the start and/or stop positions are staggered by at least 3 base pairs, or at least 4 base pairs, or at least 5 base pairs, or at least 6 base pairs, or at least 7 base pairs, or at least 8 base pairs, or at least 9 base pairs, or at least 10 base pairs, or at least 15 base pairs, or at least 20 base pairs, or at least 25 base pairs. Typically, the start and/or stop positions are staggered by 5-10 base pairs. In one embodiment, the start and/or stop positions are staggered by 5 base pairs. In another embodiment, the start and/or stop positions are staggered by 10 base pairs.

### Sample Collection and Preparation

[0097] The methods of the invention can be used with a variety of biological samples that contain only or predominantly fetal or embryonic DNA. As used herein, a sample containing “predominantly fetal or embryonic DNA” is one that contains more than 50% fetal or embryonic DNA, and typically contains more than 90%, or 95% or 99% fetal or embryonic DNA. In one embodiment, the source of the sample that contains predominantly fetal or embryonic DNA is fetal or embryonic cells obtained from embryo biopsy of in vitro fertilized (IVF) pre-implantation embryos. It has been demonstrated that intact cells can be obtained from IVF pre-implantation embryos for Pre-implantation Genetic Screening (PGS) and Pre-implantation Genetic Diagnosis (PGD) processes. An ovum is fertilized through IVF and resulting cells are collected during in vitro growth of the embryo. For example, cells can be collected from a day 3 embryo or a day 5 embryo. Typically, if cell harvesting is performed at day 3 a single fetal cell is obtained, also known as a blastomere, and if harvesting is performed at day 5 a few cells are obtained, also known as trophectoderm cells. Typically, the genetic integrity of the grown fetal cells is interrogated using array Comparative Genomic Hybridization (aCGH), a technology that can detect genetic abnormalities of a certain genomic size and above. The method of the disclosure provides an alternative means for detecting genomic abnormalities in fetal cells obtained from an embryo, which enables higher resolution of the interrogated genome.

[0098] In another embodiment, the source of the sample that contains predominantly fetal or embryonic DNA is fetal or embryonic cells obtained non-invasively from collecting intact cells (trophoblasts) from a maternal Papanicolaou smear (pap test). Recently it has been shown that this is a simple and safe approach for obtaining fetal or embryonic genetic material non-invasively and that the cells obtained from the pap test had an abundance (near 100%) of fetal or embryonic genetic material (Jain, C. V. et al. (2016) Science Translational Medicine 8(363):363re4-363re4).

[0099] In another embodiment, the source of the sample that contains predominantly fetal or embryonic DNA is one or a few fetal or embryonic cells found in maternal plasma. Thus, one or a few fetal or embryonic cells present in maternal plasma can be isolated and DNA from the one or a few cells can be used as the DNA sample in the methods of the invention.

[0100] In yet other embodiments, the sample containing predominantly fetal or embryonic DNA is a DNA sample that is obtained directly from fetal tissue, or from amniotic fluid, or from chorionic villi or from medium where products of conception were grown.

[0101] In another embodiment, the DNA sample that contains predominantly fetal or embryonic DNA is obtained directly from fetal or embryonic tissue.

[0102] For the biological sample preparation, typically cells are lysed and DNA is extracted using standard techniques known in the art, a non-limiting example of which is the QIAsymphony (Qiagen) protocol.

[0103] Following isolation, the cell free DNA of the sample is used for sequencing library construction to make the sample compatible with a downstream sequencing technology, such as Next Generation Sequencing. Typically this involves ligation of adapters onto the ends of the cell free DNA fragments, followed by amplification. Sequencing library preparation kits are commercially available. A non-limiting exemplary protocol for sequencing library preparation is described in detail in Example 1.

### Enrichment by TACS Hybridization

[0104] The region(s) of interest on the chromosome(s) of interest is enriched by hybridizing the pool of TACS to the sequencing library, followed by isolation of those sequences within the sequencing library that bind to the TACS. To facilitate isolation of the desired, enriched sequences, typically the TACS sequences are modified in such a way that sequences that hybridize to the TACS can be separated from sequences that do not hybridize to the TACS. Typically, this is achieved by fixing the TACS to a solid support. This allows for physical separation of those sequences that bind the TACS from those sequences that do not bind the TACS. For example, each sequence within the pool of TACS can be labeled with biotin and the pool can then be bound to beads coated with a biotin-binding substance, such as streptavidin or avidin. In a preferred embodiment, the TACS are labeled with biotin and bound to streptavidin-coated magnetic beads. The ordinarily skilled artisan will appreciate, however, that other affinity binding systems are known in the art and can be used instead of biotin-streptavidin/avidin. For example, an antibody-based system can be used in which the TACS are labeled with an antigen and then bound to antibody-coated beads. Moreover, the TACS can incorporate on one end a sequence tag and can be bound to a solid support via a complementary sequence on the solid support that hybridizes to the sequence tag. Furthermore in addition to magnetic beads, other types of solid supports can be used, such as polymer beads and the like.

[0105] In certain embodiments, the members of the sequencing library that bind to the pool of TACS are fully complementary to the TACS. In other embodiments, the members of the sequencing library that bind to the pool of TACS are partially complementary to the TACS. For example, in certain circumstances it may be desirable to utilize and analyze data that are from DNA fragments that are products of the enrichment process but that do not necessarily belong to the genomic regions of interest (i.e., such DNA fragments could bind to the TACS because of part homologies (partial complementarity) with the TACS and when sequenced would produce very low coverage throughout the genome in non-TACS coordinates).

[0106] Following enrichment of the sequence(s) of interest using the TACS, thereby forming an enriched library, the members of the enriched library are eluted from the solid support and are amplified and sequenced using standard methods known in the art. Next Generation Sequencing is typically used, although other sequencing technologies can also be employed, which provides very accurate counting in addition to sequence information. To detect genetic abnormalities, such as but not limited to, aneuploidies or structural copy number changes requires very accurate counting and NGS is a type of technology that enables very accurate counting. Accordingly, for the detection of genetic abnormalities, such as but not limited to, aneuploidies or structural copy number changes, other accurate counting methods, such as digital PCR and microarrays can also be used instead of NGS. Non-limiting exemplary protocols for amplification and sequencing of the enriched library are described in detail in Example 3.

### Data Analysis

[0107] The information obtained from the sequencing of the enriched library can be analyzed using an innovative biomathematical/biostatistical data analysis pipeline. Details of an exemplary analysis using this pipeline are described in depth in Example 4, and in further detail below. Alternative data analysis approaches for different purposes are also provided herein. For example, data analysis approaches for analyzing fetal and/or embryonic DNA samples for genetic abnormalities are described in detail in Example 6.

[0108] The analysis pipeline described in Example 4 exploits the characteristics of the TACS, and the high-efficiency of the target capture enables efficient detection of aneuploidies or structural copy number changes, as well as other types of genetic abnormalities. In the analysis, first the sample's sequenced DNA fragments are aligned to the human reference genome. QC metrics are used to inspect the aligned sample's properties and decide whether the sample is suitable to undergo classification. These QC metrics can include, but are not limited to, analysis of the enrichment patterns of the loci of interest, such as for example the overall sequencing depth of the sample, the on-target sequencing output of the sample, TACS performance, GC bias expectation, fraction of interest quantification. For determining the risk of a chromosomal abnormality in the fetal DNA of the sample, an innovative algorithm is applied. The steps of the algorithm include, but are not limited to, removal of inadequately sequenced loci, read-depth and fragment-size information extraction at TACS-specific coordinates, genetic (GC-content) bias alleviation and ploidy status classification.

[0109] Ploidy status determination is achieved using one or more statistical methods, non-limiting examples of which include a t-test method, a bootstrap method, a permutation test and/or a binomial test of proportions and/or segmentation-based methods and/or combinations thereof. It will be appreciated by the ordinarily skilled artisan that the selection and application of tests to be included in ploidy status determination is based on the number of data points available. As such, the suitability of each test is determined by various factors such as, but not limited to, the number of TACS utilized and the respective application for GC bias alleviation, if applicable. Thus, the aforementioned methods are to be taken as examples of the types of statistical analysis that may be employed and are not the only methods suitable for the determination of ploidy status. Typically, the statistical method results in a score value for the mixed sample and risk of the chromosomal abnormality in the fetal DNA is detected when the score value for the mixed sample is above a reference threshold value.

[0110] In particular, one aspect of the statistical analysis involves quantifying and alleviating GC-content bias. In addition to the challenge of detecting small signal changes in fetal DNA in the mixed sample, and/or other components of DNA of interest part of a mixed sample (for example, but not limited to, additional or less genetic material from certain chromosomal regions), the sequencing process itself introduces certain biases that can obscure signal detection. One such bias is the preferential sequencing/amplification of genetic regions based on their GC-content. As such, certain detection methods, such as but not limited to, read-depth based methods, need to account for such bias when examining sequencing data. Thus, the bias in the data needs to be quantified and, subsequently, suitable methods are applied to account for it such that genetic context dependencies cannot affect any statistical methods that may be used to quantify fetal genetic abnormality risk.

[0111] For example, one method of quantifying the GC-content bias is to use a locally weighted scatterplot smoothing (LOESS) technique on the sequencing data. Each targeted locus may be defined by its sequencing read-depth output and its' GC-content. A line of best fit through these two variables, for a large set of loci, provides an estimate of the expected sequencing read-depth given the GC-content. Once this GC-bias quantification step is completed, the next step is to use this information to account for possible biases in the data. One method is to normalize the read-depth of all loci by their expected read-depth (based on each locus' GC-content). In principle, this unlinks the read-depth data from their genetic context and makes all data comparable. As such, data that are retrieved from different GC-content regions, such as for example, but not limited, to different chromosomes, can now be used in subsequent statistical tests for detection of any abnormalities. Thus, using the LOESS procedure, the GC bias is unlinked from the data prior to statistical testing. In one embodiment, the statistical analysis of the enriched library sequences comprises alleviating GC bias using a LOESS procedure.

[0112] In an alternative embodiment, the GC-content bias is quantified and alleviated by grouping together loci of similar (matching) GC-content. Thus, conceptually this method for alleviating GC-content bias comprises of three steps, as follows:
[0113] 1) identification and calculation of GC-content in the TACS;
[0114] 2) alleviation/accounting of GC-content bias using various matching/grouping procedures of the TACS; and
[0115] 3) calculation of risk of any genetic abnormalities that may be present in the fetus utilizing statistical and mathematical methods on datasets produced from step 2.

[0116] For the t-test method, the dataset is split into two groups; the test loci and the reference loci. For each group, subsets of groups are created where loci are categorized according to their GC-content as illustrated in a non-limiting example in the sample Table 2 below:

TABLE 2

| GC | Reference loci read-depth | Test loci read-depth |
|---|---|---|
| 40% | x₁⁴⁰, x₂⁴⁰, . . . , xₙₓ₄₀⁴⁰ | y₁⁴⁰, y₂⁴⁰, . . . , y_{ny40}⁴⁰ |
| 41% | x₁⁴¹, x₂⁴¹, . . . , xₙₓ₄₁⁴¹ | y₁⁴¹, y₂⁴¹, . . . , y_{ny41}⁴¹ |
| 42% | x₁⁴², x₂⁴², . . . , xₙₓ₄₂⁴² | y₁⁴², y₂⁴², . . . , y_{ny42}⁴² |
| . . . | . . . | . . . |

It is appreciated by the ordinarily skilled artisan that subgroup creation may involve encompassing a range of appropriate GC-content and/or a subset of loci that are defined by a given GC-content and/or GC-content range. Accordingly, the % GC content given in the non-limiting example of Table 2 are to be considered “about” or “approximate”, allowing for some slight variation (e.g., 1-2%). Thus, for example, a % GC content of “40%” is intended to refer to “about 40%” or “approximately 40%”, such that, for example, “39%-41%” GC-content loci may also be encompassed if deemed appropriate.
Hence, when referring to a particular GC-content it is understood that the reference and test loci subgroups may comprise of any number of loci related to a particular % GC content and/or range.

[0117] Subsequently, for each GC-content subgroup, a representative read-depth is calculated. A number of methods may be utilized to choose this such as, but not limited to, the mean, median or mode of each set. Thus, two vectors of representative read-depth are created where one corresponds to the reference loci and the other to the test loci (e.g., Xm, Ym). In one embodiment, the two vectors may be tested against each other to identify significant differences in read-depth. In another embodiment, the difference of the two vectors may be used to assess if there are significant discrepancies between the test and reference loci. The sample is attributed the score of the test.

[0118] For statistical analysis using a bootstrap approach, the dataset is split into two groups, the test loci and the reference loci. The GC-content of each locus is then calculated. Then the following procedure is performed:

[0119] A random locus is selected from the reference loci; its read-depth and GC-content are recorded. Subsequently, a random locus from the test loci is selected, with the only condition being that its' GC-content is similar to that of the reference locus. Its read-depth is recorded. It is appreciated by the ordinarily skilled artisan that GC-content similarity may encompass a range of suitable GC-content. As such, referral to a specific % GC content may be considered as “approximate” or “proximal” or “within a suitable range” (e.g., 1%-2%) encompassing the specific % GC content under investigation. Thus, a reference-test locus pair of similar GC-content is created. The difference of the reference-test pair is recorded, say E1. The loci are then replaced to their respective groups. This process is repeated until a bootstrap sample of the same size as the number of test TACS present is created. A representative read-depth of the bootstrap sample is estimated, say E_mu, and recorded. A number of methods may be utilized to do so, such as but not limited to, the mean, mode or median value of the vector, and/or multiples thereof.

[0120] The process described above is repeated as many times as necessary and a distribution of E_mu is created. The sample is then attributed a score that corresponds to a percentile of this distribution.

[0121] For statistical analysis using a permutation test, the dataset is sorted firstly into two groups, the test-loci and the reference loci. For each group, subsets of groups are created, where loci are categorized according to their GC-content similarity (see columns 2 and 3 of the non-limiting sample Table 2 below). The number of loci present in each test subgroup is also recorded. The loci of the test group are utilized to calculate an estimate of the test-group's read-depth, say Yobs. A representative number from each GC-content subgroup may be selected to do so. Any number of methods may be used to provide a read-depth estimate, such as but not limited to, the mean, median or mode of the chosen loci.

TABLE 2

| GC | Reference loci read- | Test loci read-depth | test loci | Merging of loci |
|---|---|---|---|---|
| 40% | x₁⁴⁰, x₂⁴⁰, . . . , xₙₓ₄₀⁴⁰ | y₁⁴⁰, y₂⁴⁰, . . . , y_{ny40}⁴⁰ | ny40 | x₁⁴⁰, . . . , xₙₓ₄₀⁴⁰, y₁⁴⁰, . . . , y_{ny40}⁴⁰ |
| 41% | x₁⁴¹, x₂⁴¹, . . . , xₙₓ₄₁⁴¹ | y₁⁴¹, y₂⁴¹, . . . , y_{ny41}⁴¹ | ny41 | x₁⁴¹, . . . , xₙₓ₄₁⁴¹, y₁⁴¹, . . . , y_{ny41}⁴¹ |
| 42% | x₁⁴², x₂⁴², . . . , xₙₓ₄₂⁴² | y₁⁴², y₂⁴², . . . , y_{ny42}⁴² | ny42 | x₁⁴², . . . , xₙₓ₄₂⁴², y₁⁴², . . . , y_{ny42}⁴² |
| . . . | . . . | . . . | . . . | . . . |

A distribution to test Yobs is then built utilizing loci irrespective of their test or reference status as follows. The test and reference loci of each GC-content subgroup (see last column of sample Table 2) are combined to allow for calculation of a new read-depth estimate. From each merged subgroup a number of loci are chosen at random, where this number is upper-bounded by the number of test-loci utilized in the original calculation of Yobs (e.g., for GC content 40%, and in the context of the non-limiting sample Table 2, this number of loci may be in the range [1,ny40]). The new read-depth estimate is calculated from all the chosen loci. The procedure is iterated as many times as necessary in order to build a distribution of observed means. A sample is then attributed a score that corresponds to the position of Yobs in this distribution using a suitable transformation that accounts for the moments of the built distribution. As with the already described methods, it is appreciated that slight variation in % GC content is allowed (e.g., 1%-2%), if deemed appropriate. Hence, reference to a specific GC-content could be taken as “about” or “approximate”, so that for example when referring to a 40% GC-content, loci that are “approximately” or “about” 40% (e.g., 39%-41%) may be utilized in the method.

[0122] For statistical analysis using a binomial test of proportions, fragment-sizes aligned to TACS-specific genomic coordinates are used. It has been shown that fragments of cell free genetic material originating from the placenta tend to be smaller in length when compared to other cell free genetic material (Chan, K. C. (2004) Clin. Chem. 50:88-92). Hence, the statistic of interest is whether the proportion of small-size fragments aligned to a TACS-specific test-region deviates significantly from what is expected when comparing it to the respective proportion of other TACS-specific reference-regions, as this would indicate fetal genetic abnormalities.

[0123] Thus, fragment-sizes are assigned into two groups. Sizes related to the test loci are assigned to one group and fragment-sizes related to the reference loci are assigned to the other group. Subsequently, in each group, fragment sizes are distributed into two subgroups, whereby small-size fragments are assigned into one subgroup and all remaining fragments are designated to the remaining subgroup. The last step computes the proportion of small-sized fragments in each group and uses these quantities in a binomial test of proportions. The score of the test is attributed to the sample under investigation.

[0124] The final result of a sample may be given by combining one or more scores derived from the different statistical methods, non-limiting examples of which are given in Example 4.

[0125] For statistical analysis using segmentation methods, the read-depth and sequence composition of non-overlapping genomic regions of interest of fixed-size is obtained. On the obtained dataset, GC-content read-depth bias alleviation may be performed, but is not limited to, using a local polynomial fitting method in order to estimate the expected read-depth of regions based on their GC content. The expected value, dependent on GC-content, is then used to normalize regions using suitable methods known to those skilled in the art. The normalized dataset is subsequently processed using one or more segmentation-based classification routines. To do so the algorithms process consecutive data points to detect the presence of read-depth deviations which manifest in the form of a “jump/drop” from their surrounding data points. Depending on the segmentation routine used, data points are given a score which is used towards assigning membership into segments of similar performing read-depths. For example, consecutive data points with score values within a suitable range may be classified as one segment, whereas consecutive data points with score values which exceed the set thresholds may be assigned to a different segment. Details of segmentation-based routines are given in Example 6.

### Kits of the Invention

[0126] In another aspect, the invention provides kits for carrying out the methods of the disclosure. In one embodiment, the kit comprises a container consisting of the pool of TACS and instructions for performing the method. In one embodiment, the TACS are provided in a form that allows them to be bound to a solid support, such as biotinylated TACS. In another embodiment, the TACS are provided together with a solid support, such as biotinylated TACS provided together with streptavidin-coated magnetic beads.

[0127] In one embodiment, the kit comprises a container comprising the pool of TACS and instructions for performing the method, wherein the pool of TACS comprises a plurality of member sequences, wherein:
[0128] (i) each member sequence within the TACS pool is between 100-500 base pairs in length, each member sequence having a 5′ end and a 3′ end;
[0129] (ii) each member sequence binds to the same genomic sequence of interest at least 50 base pairs away, on both the 5′ end and the 3′ end, from regions harboring Copy Number Variations (CNVs), Segmental duplications or repetitive DNA elements; and
[0130] (iii) the GC content of the pool of TACS is between 19% and 80%, as determined by calculating the GC content of each member within the pool of TACS.

[0131] In one embodiment, the pool of TACS comprises a plurality of TACS families, wherein each TACS family comprises a plurality of member sequences, wherein each member sequence binds to the same genomic sequence of interest but has different start and/or stop positions with respect to a reference coordinate system for the genomic sequence of interest,

[0132] Furthermore, any of the various features described herein with respect to the design and structure of the TACS can be incorporated into the TACS that are included in the kit.

[0133] In various other embodiments, the kit can comprise additional components for carrying out other aspects of the method. For example, in addition to the pool of TACS, the kit can comprise one or more of the following (i) one or more components for isolating cell free DNA from a biological sample (e.g., as described in Example 1); (ii) one or more components for preparing the sequencing library (e.g., primers, adapters, buffers, linkers, restriction enzymes, ligation enzymes, polymerase enzymes and the like as described in detail in Example 1); (iii) one or more components for amplifying and/or sequencing the enriched library (e.g., as described in Example 3); and/or (iv) software for performing statistical analysis (e.g., as described in Example 4).

### Fragment-Based Analysis

[0134] In another aspect, the invention pertains to fragment based analysis of samples, described further in Example 7. There is evidence from the literature that fetal cell free DNA can be found in the medium of IVF products of conception and it can be used for the assessment of chromosomal abnormalities (Liu, WeiQiang, et al. (2017)). Furthermore, specific types of genetic abnormalities can be characterized by and/or associated with fragments of a smaller size than the expected size of fragments originating from healthy tissues (Jiang et al, (2015), Proceedings of the National Academy of Sciences, 112(11), ppE1317-E1325).

[0135] Thus, fragments-based detection may be used to detect abnormalities. For example, a binomial test of proportions, as described Example 4, can be used for the detection of increased presence of nucleic acid material originating from abnormal cells based on fragment size. In particular, under the null hypothesis that the distribution of fragment sizes originating from both euploid and aneuploid cells is the same, a binomial test for proportions (as described in Example 4) using continuity correction can be utilized to quantify any evidence against it.

### EXAMPLES

[0136] The present invention is further illustrated by the following examples, which should not be construed as further limiting. The contents of all references, appendices, Genbank entries, patents and published patent applications cited throughout this application are expressly incorporated herein by reference in their entirety.

### Example 1: Sample Collection and Library Preparation

[0137] The general methodology for the TACS-based multiplexed parallel analysis approach for genetic assessment is shown schematically in FIG. 1. In this example, methods for collecting and processing a fetal or embryonic DNA sample, followed by sequencing library preparation for use in the methodology of FIG. 1 are described.

### Sample Collection

[0138] Fetal cell samples were obtained from 3-day and 5-day biopsy embryos respectively were subjected to the TACS methodology shown in FIG. 1 to determine the status of genetic abnormalities. Protocols used for collecting samples for our study were approved by the Cyprus National Bioethics Committee, and informed consent was obtained from all participants.

### Sequencing Library Preparation

[0139] Collected fetal cells were initially lysed and DNA extracted using the Rubicon Genomics PicoPLEX® WGA Kit (Liang, L. et al. (2013) PLoS One 8(4), p. e61838). Following a pre-amplification step, the lysed material was amplified using amplification enzyme and buffer supplied by the manufacturer. Subsequently, DNA was purified followed by fragmentation using sonication. Following fragmentation, standard library preparation methods were used with the following modifications. A negative control extraction library was prepared separately to monitor any contamination introduced during the experiment. During this step, 5′ and 3′ overhangs were filled-in, by adding 12 units of T4 polymerase (NEB) while 5′ phosphates were attached using 40 units of T4 polynucleotide kinase (NEB) in a 100 μl reaction and subsequent incubation at 25° C. for 15 minutes and then 12° C. for 15 minutes. Reaction products were purified using the MinElute® kit (Qiagen). Subsequently, adaptors P5 and P7 (see adaptor preparation) were ligated at 1:10 dilution to both ends of the DNA using 5 units of T4 DNA ligase (NEB) in a 401 μl reaction for 20 minutes at room temperature, followed by purification using the MinElute® kit (Qiagen). Nicks were removed in a fill-in reaction with 16 units of Bst polymerase (NEB) in a 40 μl reaction with subsequent incubation at 65° C. for 25 minutes and then 12° C. for 20 minutes. Products were purified using the MinElute® kit (Qiagen). Library amplification was performed using a Fusion polymerase (Herculase® II Fusion DNA polymerase (Agilent Technologies) or Pfusion® High Fidelity Polymerase (NEB)) in 50 μl reactions and with the following cycling conditions, 95° C. for 3 minutes; followed by 10 cycles at 95° C. for 30 seconds, 60° C. for 30 seconds, 72° C. for 30 seconds and finally 72° C. for 3 minutes (Koumbaris, G. et al. (2015) Clinical chemistry, 62(6), pp. 848-855). The final library products were purified using the MinElute® Purification Kit (Qiagen) and measured by spectrophotometry.

### Adaptor Preparation

[0140] Hybridization mixtures for adapter P5 and P7 were prepared separately and incubated for 10 seconds at 95° C. followed by a ramp from 95° C. to 12° C. at a rate of 0.1° C./second. P5 and P7 reactions were combined to obtain a ready-to-use adapter mix (100 μM of each adapter). Hybridization mixtures were prepared as follows: P5 reaction mixture contained adaptor P5_F (500 μM) at a final concentration of 200 μM, adaptor P5+P7_R (500 μM) at a final concentration of 200 μM with 1× oligo hybridization buffer. In addition, P7 reaction mixture contained adaptor P7_F (500 μM) at a final concentration of 200 IM, adapter P5+P7_R(500 μM) at a final concentration of 200 μM with 1× oligo hybridization buffer (Koumbaris, G. et al. (2015) Clinical chemistry, 62(6), pp. 848-855). Sequences were as follows, wherein *=a phosphorothioate bond (PTO) (Integrated DNA Technologies):

adaptor P5_F:
(SEQ ID NO: 2551)
A*C*A*C*TCTTTCCCTACACGACGCTCTTCCG*A*T*C*T
adaptor P7_F:
(SEQ ID NO: 2552)
G*T*G*A*CTGGAGTTCAGACGTGTGCTCTTCCG*A*T*C*T,
adaptor_P5 + P7_R:
(SEQ ID NO: 2553)
A*G*A*T*CGGAA*G*A*G*C

### Example 2: TArget Capture Sequences (TACS) Design and Preparation

[0141] This example describes preparation of custom TACS for the detection of whole or partial chromosomal abnormalities for chromosomes 1-22, X and Y or any other chromosome, as well as other genetic abnormalities, such as but not limited to, chromosomal mosaicism, microdeletion/microduplication syndromes, translocations, inversions, insertions, and other point or small size mutations. The genomic target-loci used for TACS design were selected based on their GC content and their distance from repetitive elements (minimum 50 bp away). TACS size can be variable. In one embodiment of the method the TACS range from 100-500 bp in size and are generated through a PCR-based approach as described below. The TACS were prepared by simplex polymerase chain reaction using standard Taq polymerase, primers designed to amplify the target-loci, and normal DNA used as template.

[0142] All custom TACS were generated using the following cycling conditions: 95° C. for 3 minutes; 40 cycles at 95° C. for 15 seconds, 60° C. for 15 seconds, 72° C. for 12 seconds; and 72° C. for 12 seconds, followed by verification via agarose gel electrophoresis and purification using standard PCR clean up kits such as the QIAquick® PCR Purification Kit (Qiagen) or the NucleoSpin® 96 PCR clean-up (Mackerey Nagel) or the Agencourt® AMPure® XP Kit for PCR Purification (Beckman Coulter). Concentration was measured by Nanodrop (Thermo Scientific).

### Example 3: TACS Hybridization and Amplification

[0143] This example describes the steps schematically illustrated in FIG. 1 of target capture by hybridization using TACS, followed by quantitation of captured sequences by Next Generation Sequencing (NGS).

### TACS Biotinylation

[0144] TACS were prepared for hybridization, as previously described (Koumbaris, G. et al. (2015) Clinical chemistry, 62(6), pp. 848-855), starting with blunt ending with the Quick Blunting™ Kit (NEB) and incubation at room temperature for 30 minutes. Reaction products were subsequently purified using the MinElute® kit (Qiagen) and were ligated with a biotin adaptor using the Quick Ligation™ Kit (NEB) in a 40 μl reaction at RT for 15 minutes. The reaction products were purified with the MinElute® kit (Qiagen) and were denatured into single stranded DNA prior to immobilization on streptavidin coated magnetic beads (Invitrogen).

### TACS Hybridization

[0145] Amplified libraries were mixed with blocking oligos (Koumbaris, G. et al. (2105) Clinical chemistry, 62(6), pp. 848-855) (200 M), 5 μg of Cot-1 DNA (Invitrogen), 50 μg of Salmon Sperm DNA (Invitrogen), Agilent hybridization buffer 2×, Agilent blocking agent 10×, and were heated at 95° C. for 3 minutes to denature the DNA strands. Denaturation was followed by 30 minute incubation at 37° C. to block repetitive elements and adaptor sequences. The resulting mixture was then added to the biotinylated TACS. All samples were incubated in a rotating incubator for 12-48 hours at 66° C. After incubation, the beads were washed as described previously and DNA was eluted by heating (Koumbaris, G. et al. (2105) Clinical chemistry, 62(6), pp. 848-855). Eluted products were amplified using outer-bound adaptor primers. Enriched amplified products were pooled equimolarly and sequenced on a suitable platform.

### Example 4: Bioinformatics Sample Analysis

[0146] This example describes representative statistical analysis approaches for use in the methodology illustrated in FIG. 1 (“analysis pipeline” in FIG. 1).

### Human Genome Alignment

[0147] For each sample, the bioinformatic pipeline routine described below was applied in order to align the sample's sequenced DNA fragments to the human reference genome. Targeted paired-end read fragments obtained from NGS results were processed to remove adaptor sequences and poor quality reads (Q-score<25) using the cutadapt software (Martin, M. et al. (2011) EMB.netJournal 17.1). The quality of the raw and/or processed reads as well as any descriptive statistics which aid in the assessment of quality check of the sample's sequencing output were obtained using the FastQC software (Babraham Institute (2015) FastQC) and/or other custom-built software. Processed reads which were at least 25 bases long were aligned to the human reference genome built hg19 (UCSC Genome Bioinformatics) using the Burrows-Wheel Alignment algorithm (Li, H. and Durbin, R. (2009) Bioinformatics 25:1754-1760) but other algorithms known to those skilled in the art may be used as well. If relevant, duplicate reads were removed post-alignment. Where applicable, sequencing output pertaining to the same sample but processed on separate sequencing lanes, was merged to a single sequencing output file. The removal of duplicates and merging procedures were performed using the Picard tools software suite (Broad Institute (2015) Picard) and/or the Sambamba tools software suite (Tarasov, Artem, et al. “Sambamba: fast processing of NGS alignment formats.” Bioinformatics 31.12 (2015): 2032-2034.).

[0148] The above software analysis resulted in a final aligned version of a sequenced sample against the human reference genome and all subsequent steps were based on this aligned version. Information in terms of Short Nucleotide Polymorphisms (SNPs) at loci of interest was obtained using bcftools from the SAMtools software suite (Li, H. et al. (2009) Bioinformatics 25:2078-2079) and/or other software known to those skilled in the art. The read-depth per base, at loci of interest, was obtained using the mpileup option of the SAMtools software suite, from here on referred to as the mpileup file. Information pertaining to the size of the aligned fragments was obtained using the view option of the SAMtools software suite, from here on referred to as the fragment-sizes file and/or other software known to those skilled in the art.

[0149] The mpileup file and the fragment-sizes file were processed using custom-build application programming interfaces (APIs) written in the Python and R programming languages (Python Software Foundation (2015) Python; The R Foundation (2015) The R Project for Statistical Computing). The APIs were used to determine the ploidy state of chromosomes of interest, and/or other genetic abnormalities in regions of interest across the human genome, using a series of steps (collectively henceforth referred to as the “algorithm”) and to also collect further descriptive statistics to be used as quality check metrics, such as but not limited to fetal fraction quantification (collectively henceforth referred to as the “QC metrics”). The APIs can also be used for the assessment of genetic abnormalities from data generated when applying the described method in cases of multiple gestation pregnancies, as well as other genetic abnormalities such as, but not limited to, microdeletions, microduplications, copy number variations, translocations, inversions, insertions, point mutations and mutational signatures.

### QC Metrics

[0150] QC metrics were used to inspect an aligned sample's properties and decide whether the sample was suitable to undergo classification. These metrics were, but are not limited to, the enrichment of a sample. The patterns of enrichment are indicative of whether a sample has had adequate enrichment across loci of interest in a particular sequencing experiment (herein referred to as a “run”). To assess this, various metrics are assessed, non-limiting examples of which are:
[0151] (i) overall sample on-target read depth,
[0152] (ii) sample on-target sequencing output with respect to total mapped reads,
[0153] (iii) individual TACS performance in terms of achieved read-depth,
[0154] (iv) kurtosis and skewness of individual TACS enrichment,
[0155] (v) kurtosis and skewness moments that arise from all TACS,
[0156] (vi) fragment size distribution,
[0157] (vii) percentage of duplication
[0158] (viii) percentage of paired reads and,
[0159] (ix) percentage of aligned reads,
   if applicable.

[0160] The above checks are also taken into consideration with regards to GC-bias enrichment. Samples that fail to meet one or more of the criteria given above are flagged for further inspection, prior to classification.

### The Algorithm

[0161] The algorithm is a collection of data processing, mathematical and statistical model routines arranged as a series of steps. The algorithm's steps aim in deciding the relative ploidy state of a chromosome of interest with respect to all other chromosomes of the sequenced sample and is used for the detection of whole or partial chromosomal abnormalities for chromosomes 1-22, X and Y or any other chromosome, as well as other genetic abnormalities such as, but not limited to, chromosomal mosaicism, microdeletion/microduplication syndromes and other point or small size mutations. As such the algorithm can be used, but is not limited to, the detection of whole or partial chromosomal abnormalities for chromosomes 13, 18, 21, X, Y or any other chromosome, as well as other genetic abnormalities such as, but not limited to, microdeletions, microduplications, copy number variations, translocations, inversions, insertions, point mutations and other mutational signatures.

[0162] For read-depth associated tests, the algorithm compares sequentially the read-depth of loci from each chromosome of interest (herein referred to as the test chromosome) against the read-depth of all other loci (herein referred to as the reference loci) to classify its ploidy state. For each sample, these steps were, but are not limited to:
[0163] (a) Removal of inadequately sequenced loci. The read-depth of each locus was retrieved. Loci that have not achieved a minimum number of reads, were considered as inadequately enriched and were removed prior to subsequent steps.
[0164] (b) Genetic (GC-content) bias alleviation. The sequencing procedure may introduce discrepancies in read-depth across the loci of interest depending on their GC content. To account for such bias, a novel sequence-matching approach that increases both sensitivity and specificity to detect chromosomal aneuploidies was employed. The GC content of each locus on the test chromosome was identified and similar genetic loci were grouped together to form genetically matched groups. The procedure was repeated for the reference loci. Then, genetically matched groups from the test chromosome were conditionally paired with their genetically matched group counterparts on the reference chromosome(s). The groups may have any number of members. The conditionally matched groups were then used to assess the ploidy status of test chromosomes.
[0165] (c) Genetic abnormality determination. Ploidy status determination, or other genetic abnormalities of interest such as but not limited to microdeletions, microduplications, copy number variations, translocations, inversions, insertions, point mutations and other mutational signatures was achieved using a single statistical method and/or a weighted score approach on the result from the following, but not limited to, statistical methods:

[0166] Statistical Method 1: The differences in read-depth of the conditionally paired groups were tested for statistical significance using the t-test formula:

$$t = \frac{\hat{x} - μ}{s / \sqrt{n}}$$

where t is the result of the t-test, tis the average of the differences of the conditionally paired groups, p is the expected read-depth and is set to a value that represents insignificant read-depth differences between the two groups, s the standard deviation of the differences of the conditionally paired groups and n the length of the vector of the conditionally paired differences. The magnitude of the t-score was then used to identify evidence, if any, against the null hypothesis of same ploidy between reference and test chromosomes. Specifically, t>=c1 (where c1 is a predefined threshold belonging to the set of all positive numbers) shows evidence against the null hypothesis of no difference.

[0167] Statistical Method 2: Bivariate nonparametric bootstrap. The bootstrap method depends on the relationship between the random variables X (read-depth of reference loci) and Y (read-depth of test loci). Here, the read depth of baits on the reference group (random variable denoted by X) were treated as the independent covariate. The first step of the iterative procedure involved random sampling with replacement (bootstrapping) of the read-depths of loci on the reference chromosomes, i.e., (x1,g1), . . . , (xn,gn), where the parameter g is known and denotes the GC-content of the chosen bait. Then, for each randomly selected reference bait (xi,gi), a corresponding read depth was generated for a genetically matched locus i.e., (y1,g1), . . . , (yn,gn). Thus, the bivariate data (x1,y1), (x2,y2), . . . , (xn,yn) was arrived at, which was conditionally matched on their GC-content (parameter gi). The differences between the read depths of the genetically matched bootstrapped values xi and yi were used to compute the statistic of interest in each iteration. In one embodiment this statistical measure can be, but is not limited to, the mode, mean or median of the recorded differences, and/or multiples thereof. The procedure was repeated as necessary to build up the distribution of the statistic of interest from these differences. The sample was assigned a score that corresponds to a specific percentile of the built distribution (e.g. 5^{th} percentile). Under the null hypothesis the ploidy between chromosomes in the reference and test groups is not different. As such, samples whose score for a particular chromosome, was greater than a predefined threshold, say c2, were classified as statistically unlikely to have the same ploidy. Other statistical measures may be employed.

[0168] Statistical Method 3: Stratified permutation test. The statistic of interest is the read-depth estimate of the test chromosome, denoted by, Ŷ_{obs} which is calculated using all loci of the test chromosome's genetically matched groups as follows:

$${\hat{Y}}_{obs} = \frac{{\sum }_{j = 1}^{j = T} {\sum }_{i = 1}^{i = Nj} {y}_{ij}}{{\sum }_{j = 1}^{j = T} Nj}$$

where yᵢⱼ is the read-depth of locus i part of the genetically matched group j (i.e., loci belonging to a specific group based on their GC-content), Nj is the number of test loci part of the genetically matched group j and T is the number of genetically matched groups.

[0169] Subsequently, a null distribution to test Ŷ_{obs} was built. To do so, for each group j, the test and reference loci were combined (exchangeability under the null hypothesis), and each group j was sampled randomly up to Nj times without replacement (stratified permutation). This created a vector of values, say yi, and from this the vector's average value, say, was calculated. The procedure was repeated as necessary to build the null distribution. Finally, Ŷ_{obs} was studentised against the null distribution using the formula:

$${Z}_{Yobs} = \frac{{Y}_{\hat{ob} s} - \hat{Y}}{{σ}_{Y}}$$

where Ŷ and σ_{Y} are the first and square root of the second moment of all permuted ýᵢ statistic values. Samples whose Z_{Y obs} was greater than a predefined threshold, say c3, were statistically less likely to have the same ploidy in the reference and test groups.

[0170] In the case of fragment-size associated tests, the algorithm computes the proportion of small-size fragments found in test-loci and compares it with the respective proportion in reference-loci as described in Statistical Method 4 below.

[0171] Statistical Method 4: Fragment Size Proportions. For each sample the number and size of fragments aligned onto the human reference genome at the corresponding TACS coordinates, is extracted. The data is subsequently filtered so as to remove fragment-sizes considered statistical outliers using the median outlier detection method. Specifically, outliers are defined as those fragments whose size is above or below the thresholds, Fₜₕᵣ, set by equation

Fₜₕᵣ=F_{median}±(X×IQR)

where F_{median} is the median fragment-size of all fragments of a sample, X is a variable that can take values from the set of R+, and IQR is the interquartile range of fragment sizes. Thereafter, a binomial test of proportions is carried out to test for supporting evidence against the null hypothesis, H0, where this is defined as:
H0: The proportion of small fragments of the test-region is not different from the proportion of small-fragments of the reference region.

[0172] In various embodiments of the invention, small fragments are defined as those fragments whose size is less than or equal to a subset of Z+that is upper-bounded by 160 bp. If the set of all TACS are defined as T, then the test region can be any proper subset S which defines the region under investigation, and the reference region is the relative complement of S in T. For example, in one embodiment of the invention, the set S is defined by all TACS-captured sequences of chromosome 21 and thus the reference set is defined by all TACS-captured fragments on the reference chromosomes, and/or other reference loci

The alternative hypothesis, H1, is defined as:
H1: The proportion of small fragments of the test-region is not equal to the proportion of test fragments of the reference region.

[0173] As such, and taking into account continuity correction, the following score is computed (Brown et. al, Harrel):

$${W}_{test} = ( {p}^{´} - {p}_{ref} ) / \sqrt{\frac{{p}^{´} ( 1 - {p}^{´} )}{{N}_{test}}}$$

$$where$$

$${p}^{´} = \frac{( {F}^{´} + 0.5 )}{( {N}_{test} + 1 )}$$

$${p}_{ref} = \frac{( {F}_{ref} + 0.5 )}{( {N}_{ref} + 1 )}$$

\acute{F} is the number of small-size fragments on the test-region, F_{ref} the number of small size fragments on the reference region, Nₜₑₛₜ the number of all fragments on the test region and N_{ref} the number of all fragments on the reference region.

[0174] For each sample, the algorithm tests sequentially the proportion of fragment sizes of regions under investigation (for example, but not limited to, chromosome 21, chromosome 18, chromosome 13 or other (sub)chromosomal regions of interest) against reference regions; those not under investigation at the time of testing. For each sample a score is assigned for each test. Scores above a set-threshold, say c4, provide evidence against the null hypothesis.

[0175] Weighted Score method 1: In one embodiment of the method, a weighted score was attributed to each sample s, computed as a weighted sum of all statistical methods using the formula:

Vₛ(R,F)=z₁ max{Rₛ,Fₛ}+(1−z₁)min{Rₛ,Fₛ}

where Rₛ is the run-specific corrected score arising from a weighted contribution of each read-depth related statistical method for sample s and is defined as:

$${R}_{s} = \frac{( {\sum }_{i} {w}_{i} {S}_{is} - {{R}^{´}}_{r} )}{{σ}_{r}}$$

and Ŕᵣ is the run-specific median value calculated from the vector of all unadjusted read-depth related weighted scores that arise from a single sequencing run, and σᵣ is a multiple of the standard deviation of R scores calculated from a reference set of 100 euploid samples. The terms max{Rₛ,Fₛ} and min{Rₛ,Fₛ} denote the maximum and minimum values of the bracketed set, respectively.
Fₛ is the run-specific corrected score arising from the fragment-size related statistical method and is defined as:

$${F}_{s} = \frac{( {W}_{test} - {{R}^{´}}_{f} )}{{σ}_{f}}$$

where Wₜₑₛₜ is as defined earlier, Ŕ_{f} is the run specific median calculated from the vector of all unadjusted fragment-related statistical scores that arise from a single sequencing run, and σ_{f} is a multiple of the standard deviation of F scores calculated from a reference set of 100 euploid samples.

[0176] A unique classification score of less than a predefined value indicates that there is no evidence from the observed data that a sample has a significant risk of aneuploidy.

[0177] Weighted Score method 2: In another embodiment of the method, the weighted score arising from the statistical methods described above was used to assign each sample a unique genetic abnormality risk score using the formula:

$$R ( t , c ) = {\sum }_{j = 0}^{j = N} {w}_{j} \frac{{t}_{j}}{{c}_{j}}$$

where R is the weighted score result, wⱼ the weight assigned to method j, tⱼ the observed score resulting from method j, and cⱼ the threshold of method j.

[0178] A unique classification score of less than a predefined value indicates that there is no evidence from the observed data that a sample has a significant risk of aneuploidy.

[0179] Since all read depths from baits in the reference group were assumed to be generated from the same population, and in order to have a universal threshold, run-specific adjustments were also employed to alleviate run-specific biases.

[0180] The aforementioned method(s), are also suitable for the detection of other genetic abnormalities, such as but not limited to, subchromosomal abnormalities. A non-limiting example is the contiguous partial loss of chromosomal material leading to a state of microdeletion, or the contiguous partial gain of chromosomal material leading to a state of microduplication. A known genetic locus subject to both such abnormalities is 7q11.23. In one embodiment of statistical method 1, synthetic plasma samples of 5%, 10% and 20% fetal material were tested for increased risk of microdeletion and/or microduplication states for the genetic locus 7q11.23.

[0181] For point mutations various binomial tests are carried out that take into consideration the fetal fraction estimate of the sample, f, the read-depth of the minor allele, r, and the total read-depth of the sequenced base, n. Two frequent, yet non-limiting examples involve assessment of the risk when the genetic abnormality is a recessive point mutation or a dominant point mutation.

[0182] In addition to the above, fetal sex determination methods were also developed, with non-limiting examples given below. In one embodiment of the invention, fetal sex was assigned to a sample using a Poisson test using the formula:

$$Pr ( {r}_{y} \leq k ) = {e}^{- λ} {\sum }_{l = 0}^{\text{?}} \frac{{λ}^{i}}{\text{?}}$$

$$where$$

$$λ = \frac{fB μ}{2}$$

$$\text{?} \text{indicates text missing or illegible when filed}$$

and f is the fetal fraction estimate of the sample, B is the number of target sequences on chromosome Y, μ is the read-depth of the sample and k is the sum of reads obtained from all targets B. The null hypothesis of the Poisson test was that the sample is male. A value of Pr(r_{y}) less than a threshold c_{y} was considered as enough evidence to reject the null hypothesis, i.e. the sample is not male. If any of the terms for computing Pr(r_{y}) were unavailable, then the sample's sex was classified as NA (not available).

[0183] In another embodiment of the invention, fetal sex was assigned using the average read-depth of target sequences on chromosome Y. If the average read-depth of the target-sequences was over a predefined threshold, where such threshold may be defined using other sample-specific characteristics such as read-depth and fetal-fraction estimate, the fetal sex was classified as male. If the average read-depth was below such threshold then the sample was classified as female.

### Example 5: Target Enrichment Using Families of TACS

[0184] In this example, a family of TACS, containing a plurality of members that all bind to the same target sequence of interest, was used for enrichment, compared to use of a single TACS binding to a target sequence of interest. Each member of the family of TACS bound to the same target sequence of interest but had a different start and/or stop coordinates with respect to a reference coordinate system for that target sequence (e.g., the human reference genome built hg19). Thus, when aligned to the target sequence, the family of TACS exhibit a staggered binding pattern, as illustrated in FIG. 3. Typically, the members of a TACS family were staggered approximately 5-10 base pairs.

[0185] A family of TACS containing four members (i.e., four sequences that bound to the same target sequence but having different start/stop positions such that the binding of the members to the target sequence was staggered) was prepared. Single TACS hybridization was also prepared as a control. The TACS were fixed to a solid support by labelling with biotin and binding to magnetic beads coated with a biotin-binding substance (e.g., streptavidin or avidin) as described in Example 3. The family of TACS and single TACS were then hybridized to a sequence library, bound sequences were eluted and amplified, and these enriched amplified products were then pooled equimolarly and sequenced on a suitable sequencing platform, as described in Example 3.

[0186] The enriched sequences from the family of TACS sample and the single TACS sample were analyzed for read-depth. The results are shown in FIGS. 4A and 4B. As shown in FIG. 4A, target sequences of interest enriched using the family of four TACS (square symbol) exhibited a fold-change in read-depth when compared to control sequences that were subjected to enrichment using only a single TACS (X symbol). Fold-change was assessed by normalizing the read-depth of each locus by the average read-depth of a sample, wherein the average read-depth was calculated from all loci enriched with a single TACS. As shown in FIG. 4B, an overall 54.7% average increase in read-depth was observed using the family of four TACS.

[0187] This example demonstrates that use of a family of TACS, as compared to a single TACS, results in significantly improved enrichment of a target sequence of interest resulting in significantly improved read-depth of that sequence.

### Example 6: Analysis of Fetal DNA Samples from Embryo Biopsy

[0188] In this example, fetal DNA samples obtained from fetal cells from embryo biopsy were analyzed using the TACS-based methodology shown in FIG. 1 to detect chromosomal abnormalities in the fetal samples.

### Fetal Sample Collection, Library Preparation and TACS Enrichment

[0189] Fetal cell samples were obtained from 3-day and 5-day biopsy embryos respectively were subjected to the TACS methodology shown in FIG. 1 to determine the status of genetic abnormalities. All samples were previously referred for Pre-implantation Genetic Screening (PGS) and subjected to array Comparative Genomic Hybridization (aCGH) as part of the routine screening test. Results of aCGH were used as a reference standard for the results obtained.

[0190] Collected fetal cells were initially lysed and DNA extracted using the Rubicon Genomics PicoPLEX® WGA Kit (Liang, L. et al. (2013) PLoS One 8(4), p. e61838).

[0191] For certain samples in which whole-genome sequencing was to be performed, the lysed material was subjected to whole genome amplification using commercial whole genome amplification kits. Briefly, following a pre-amplification step, the lysed material was then amplified using amplification enzyme and buffer supplied by the manufacturer. Subsequently, DNA was purified followed by fragmentation using sonication. Fragmented DNA was then processed using standard sequencing library preparation methods such as described in Example 1, typically involving ligation of adapters onto the ends of the cell free DNA fragments, followed by amplification. In addition to the description provided in Example 1, sequencing library preparation kits are commercially available for this purpose.

[0192] For samples in which TACS-based enrichment was to be performed, then the sequencing library obtained from the above methods underwent TACS hybridization essentially as described in Example 3. The region(s) of interest on the chromosome(s) of interest were enriched by hybridizing the pool of TACS to the sequencing library, followed by isolation of those sequences within the sequencing library that bind to the TACS. To facilitate isolation of the desired, enriched sequences, typically the TACS sequences were modified such that sequences that hybridized to the TACS were separable from sequences that did not hybridize to the TACS. Typically this was achieved by fixing the TACS to a solid support such as described in Example 3, thereby allowing for physical separation of those sequences that bind the TACS from those sequences that do not bind the TACS. The pools of TACS used either can contain a plurality of single TACS that bind to different target sequences of interest or, alternatively, can contain a plurality of families of TACS containing a plurality of members that each bind to the same target sequence of interest but with different start and/or stop positions on the target sequence, as described in Example 5.

[0193] For analysis of fetal DNA samples by TACS-based enrichment, the pool of TACS can contain TACS that target a subset of chromosomes of interest (e.g., chromosomes 13, 18, 21, X and Y). More preferably, however, the pool of TACS contains various TACS that target every chromosome within the human genome (chromosomes 1-22, X and Y) such that the entire genome is encompassed, allowing for determination of chromosomal abnormalities in any chromosome within the human genome.

[0194] Next Generation Sequencing (NGS) typically was used to sequence the TACS-enriched sequences (or the whole genome for samples analyzed by whole genome sequencing), thereby providing very accurate counting as well as sequence information. Library products were pooled equimolarly and then subjected to sequencing.

### Data Analysis

[0195] Sequencing data obtained from NGS were processed to remove adaptor sequences and poor quality reads. Reads whose length was at least 25 bases long post adaptor-removal were aligned to the human reference genome built hg19. If relevant, duplicate reads were removed post-alignment. Where applicable, sequencing output pertaining to the same sample but processed on separate sequencing lanes, was merged to a single sequencing output file. Software analysis provides a final aligned version of a sequenced sample against the human reference genome from which information was extracted in terms of Short Nucleotide Polymorphisms (SNPs) at loci of interest, read-depth per base and the size of aligned fragments.

[0196] For whole-genome sequencing and TACS-based whole-genome sequencing, the read-depth of non-overlapping genomic regions of fixed size (e.g. 50 kb or 1 Mb) was obtained by using the samtools bedcov tool, which provides the sum of all reads across a specified genomic region. The obtained value was divided by the length of the windows. For TACS targeted-based sequencing, the read-depth was obtained by using the samtools mpileup tool, which provides information on the read-depth per base, across specified contiguous sequences or the bedcov tool. The median value of the obtained information was assigned as the read-depth of a given locus. Removal of read-depth outliers was performed using either a median-based or mean-based outlier detection approach. Finally, GC-content read-depth bias alleviation was achieved using a local polynomial fitting method to estimate the expected read-depth of regions based on their GC content and then normalize regions using this expected value accordingly.

[0197] The normalized read-depth from all regions was used as input into
[0198] (a) various segmentation-based classification algorithms (described further below), and/or
[0199] (b) score-based classification algorithms (described further below),
   which were then used to determine the ploidy status of the interrogated regions, as well as the size of any genetic aneuploidies. Score-based classification algorithms were used only with targeted enrichment sequencing data.

### Ploidy Status Determination Using Segmentation Algorithms

[0200] Three different types of segmentation algorithms were developed and applied to fetal DNA sample analysis: (i) Likelihood-based segmentation; (ii) Segmentation using small overlapping windows; and (iii) Segmentation using parallel pairwise testing, each of which is described further below, along with the results for application of the algorithm.

[0201] Each algorithm is a collection of data processing and statistical modeling routines arranged as a series of steps with aim to decide if the observed sequencing data does not support the null hypothesis, H0 defined as:

[0202] H0=There are no ploidy deviations from the expected ploidy state.

For human genomes the expected ploidy state is the diploid state. The segmentation approach aims to discover breakpoints in consecutive data where there is a clear distinction between read-depths, which in turn indicates that there is a change in ploidy state. The algorithms are described below.

[0203] A. Likelihood-Based Segmentation

[0204] Given a set of ordered data points {x_{1},x_{2},x_{3},x_{4}, . . . ,x_{N}}, that describe read-depth, the aim was to infer at which point x_{i} the data changes distribution (i.e. there is a significant and consecutive change in read-depth). This was labeled as the break point ϑ_{1}. For example, if the data changes distribution after x_{3} then ϑ_{1}=x_{3}. If more than one break point exists, then the algorithm will label the next discovered break point as ϑ_{2}. The algorithm steps were as follows:
[0205] (a) Given a sequence of data (i,x_{i}), where i=1 . . . N, the algorithm estimates the number of modes in the data. To this end, a process known as bivariate kernel density estimation was utilized. For example, if there was a single breakpoint, then the algorithm returned that there were 2 modes in our data distribution.
[0206] (b) Decide the position of the break point(s) in the data, if such point(s) exist(s). This was achieved with the following algorithm:
[0207] (1) Based on the number of breakpoints found in (a) define the probability density function (p.d.f) of the data, which depends on the unknown values of the breakpoints. This may be, but not limited to, a mixture of Normal distributions.
[0208] (2) Calculate the maximum likelihood estimate of the p.d.f in (1) for a fixed set of value(s) for the breakpoints.
[0209] (3) Repeat (2) for different sets of break point value(s).
[0210] (4) Select as estimated break point(s) the values that maximizes step (2).
   It was noted that the algorithm does this by assigning membership in all combinations for all breakpoints estimated in part (a). As an example, if the probability is maximized when data points x_{1} to x_{3} come from the first distribution then ϑ_{1}=x_{3} and membership of x_{1} to x_{3} is assigned to the first distribution and x_{4} to x_{N} to the next identified distribution(s). If the likelihood is maximized with all data points x_{i} assigned to the same mode then no break-point is defined and all data points are assigned to the same distribution. Various distributions and computational methods known to those skilled in the art can be used to implement this.

[0211] Representative results of fetal DNA analysis using the likelihood-based segmentation algorithm are shown in FIG. 5. These results demonstrate that likelihood-based segmentation analysis can classify whole-chromosome aberrations in fetal DNA samples (e.g., from PGD/PGS products of conception). At the top panel of FIG. 5, a sample without any ploidy abnormalities subjected to whole-genome sequencing is presented. The expected read-depth of each chromosome (blue horizontal bars) lies within the red lines that indicate the range of values of normal ploidy, as decided from the data. Even if on occasion individual data points (grey dots) deviate from the confidence intervals this is not sufficient evidence of ploidy aberrations according to the probabilistic metric used. Conversely, if enough data points deviate from the confidence intervals then the probabilistic measure used can assign a different ploidy state. Such a case is presented at the bottom of FIG. 5, where the sample has been determined to have monosomy 18 and monosomy 20.

[0212] In similar fashion, FIG. 10 presents results from the algorithm utilizing data derived from TACS specific coordinates combined with data from products of partial complementarity to the TACS that align to non-TACS coordinates thus producing low coverage throughout the genome. In the top panel of FIG. 10 a normal male sample is presented, whereas in the bottom panel the male sample is classified as having trisomy for chromosome 13 and monosomy for chromosome 21.

[0213] FIG. 11 presents results from the algorithm utilizing data from TACS specific coordinates only. As with FIG. 10, in the top panel of FIG. 11 a normal male sample is presented, whereas in the bottom panel the male sample is classified as having trisomy for chromosome 13 and monosomy for chromosome 21.

[0214] Thus, it can be seen that the algorithm successfully classifies TACS-based enrichment and TACS-based whole genome sequencing data, allowing for correct classification of chromosomal abnormalities and at the same time requiring significantly less sequencing than massively parallel shotgun sequencing approaches.

[0215] B. Segmentation Using Small Overlapping Windows

[0216] Given a set of data points the aim was to decide membership of each data point into a set of clusters, based on a thresholding scheme. The algorithm does so as follows:
[0217] (a) Given a set of consecutive read-depth data x_{i} (i=1 to N) the data are divided into overlapping windows of fixed size. For example let w_{1}={x_{1}, . . . , x{10}} denote the first window, then w_{2}={x_{2}, . . . , x_{11}}, w_{3}={x_{3}, . . . , x_{12}} etc.
[0218] (b) For each window w_{k}, a score S(k)=(X_{k}−m)/m is computed, where X_{k} is the median of w_{k} and m is the median from all x_{i} from all chromosomes.
[0219] (c) Assign cluster membership based on a thresholding value s, whereby:
   [0220] if S(k)<s, assign to cluster1
   [0221] if s<=S(k)<C_{1}s are assigned to cluster 2,
   [0222] if 2s<=S(k)<C_{2}s are assigned to cluster 3 etc.
      where C_{j}. are positive real numbers greater than one. For example, if s is a particular threshold value then all consecutive w_{k} where S(k)<s are assigned to cluster 1. All consecutive w_{k} where s<=S(k)<C_{1}s are assigned to cluster 2. All consecutive w_{k} where 2s<=S(k)<C_{2}s are assigned to cluster 3 etc. The threshold s can be either decided from the data or treated as a tuning parameter.

[0223] Representative results of ploidy determination for fetal DNA samples (e.g., PGS/PGD products of conception) using whole genome sequencing and small overlapping windows segmentation are shown in FIG. 6. The top panel illustrates a normal sample. As with FIG. 5, the expected read-depth of each chromosome (blue horizontal bars) lies within the red lines, which indicate the range of values of normal ploidy. The expected read-depth is calculated from the individual data points (grey dots). The average read-depth and data points of chromosomes X and Y lie below the bottom red-line, indicating that there is only a single copy of each chromosome, as expected for a male sample. An aneuploid sample is presented at the bottom of FIG. 6 where the sample is classified with trisomy 13 and mosaicism on chromosome 19.

[0224] C. Segmentation Using Parallel Pairwise Testing

[0225] This segmentation approach firstly performs full chromosome ploidy determination and then a sub-chromosomal ploidy determination as follows:
[0226] (a) Read-depth data from one candidate chromosome are compared with read-depth data from other chromosomes using non-parametric statistical tests. The process is repeated until all candidate chromosomes are tested.
[0227] (b) Perform a multiple comparisons adjustment on the results of the statistical tests to avoid false positive results.
[0228] (c) Depending on the statistical test result from the adjusted data, assign the relevant ploidy to candidate chromosomes that illustrate significant evidence against the null hypothesis
[0229] (d) Once full-chromosomal ploidy is determined then sub-chromosomal ploidy is tested by randomly splitting regions of each chromosome into smaller sizes. Each sub-chromosomal region is then tested for significant deviations from its expected full-chromosomal read-depth using similar statistical tests as in steps (a)-(c).

[0230] Representative results of ploidy determination for fetal DNA samples (e.g., PGS/PGD products of conception) using whole genome sequencing and small overlapping windows segmentation are presented in FIG. 7. The top panel illustrates a normal sample. As with FIGS. 5, 6, 10 and 11, the expected read-depth of each chromosome is illustrated using blue horizontal bars. In this instance, confidence interval bars have been omitted. A normal sample is presented at the top FIG. 7 whilst a sample presenting many abnormalities is presented at the bottom panel.

### Ploidy Status Determination Using Score-Based Classification

[0231] Additionally or alternatively to the segmentation-based algorithms described above, fetal DNA samples can be analyzed using score-based classification. The read-depth data were firstly transformed using square root or logarithmic transformation in order to minimize variance biases. Then methods such as those described in Example 4 were performed to decide on the ploidy status of each tested region (chromosomal and sub-chromosomal regions may be tested).

[0232] Representative results using a score-based classification system on the fetal DNA samples (e.g., PGS/PGD products of conception) are shown in FIG. 8. Green dots illustrate normal ploidy samples whilst all others that lie above or below the normal ploidy thresholds illustrate some type of abnormality. Specifically, blue dots illustrate trisomy samples, cyan dots illustrate partial trisomy samples and red dots illustrate monosomy samples.

[0233] In summary, this example demonstrates the successful analysis of fetal DNA samples (e.g., PGS/PGD products of conception) for chromosomal abnormalities using either whole genome sequencing data, TACS-based whole genome sequencing data and TACS-based enrichment data, using a variety of statistical analysis approaches. Furthermore, the example illustrates that the methods used with whole genome sequencing data can be successfully applied to TACS-based whole genome sequencing data and TACS-based enrichment data.

### Example 7: Fragment Size Based Tests

[0234] There is evidence from the literature that unhealthy tissue can be characterized by and/or associated with fragments in the plasma having a smaller size than the expected size of fragments originating from healthy tissues (Jiang et al, (2015), Proceedings of the National Academy of Sciences, 112(11), ppE1317-E1325). Furthermore, it has been shown that fetal cell free DNA can be found in the spent medium of embryo culture of PGS/PGD products of conception and that it can be used for the assessment of chromosomal abnormalities (Liu, WeiQiang, et al. (2017). Thus, a fragments-size based test can be utilized to detect the presence of somatic copy number variations. To this effect, a binomial test of proportions, as described Example 4, can be used for the detection of increased presence of nucleic acid material originating from non-healthy tissue based on fragment size. In particular, under the null hypothesis that the distribution of fragment sizes originating from both healthy and non-healthy cells is the same, a binomial test for proportions (as described in Example 4) using continuity correction can be utilized to quantify any evidence against it.

[0235] The same hypothesis holds true for fragments originating from the placenta/fetus (Chan, K. C. (2004) Clin. Chem. 50:88-92). Specifically, placenta derived fragments are generally of smaller size when compared to fragments originating from maternal tissues/cells. Accordingly, assessment of the fragment size-based test was performed using maternal plasma samples (i.e., mixed samples where cell free DNA is of maternal and fetal origin). The size of fragments that have aligned to TACS-enriched regions can be obtained from the aligned data. Subsequently, the proportion of fragments under a specific threshold from a test region is compared respective proportion of fragments from a reference region for evidence against the null hypothesis H0,

[0236] H0: The proportion of small fragments of the test-region is not different from the proportion of small-fragments of the reference region.

[0237] FIG. 9 shows results when applying the fragment sizes method to the mixed sample containing maternal and fetal DNA. The black dots are individual samples. The x-axis shows the sample index. The y-axis shows the score result of the fragments-based method. A score result greater than the one indicated by the threshold, illustrated as a grey line, indicates a deviation from the expected size of fragments illustrating the presence of aneuploidy. The results demonstrate that an aneuploid sample, having an estimated fetal fraction equal to 2.8%, was correctly identified, illustrating that fragments-based detection may be used to detect abnormalities in samples with low signal-to-noise ratio (e.g., as is the case in detection of cancer).

[0238] Accordingly, this example demonstrates the successful ability of the fragments-based detection method in detecting genetic abnormalities present in diminutive amounts. In addition to this, since small-sized fragments are associated with fragments from non-healthy tissues (Jiang et al, (2015), Proceedings of the National Academy of Sciences, 112(11), pp E1317-E1325) they can also be leveraged for the detection of small-sized mutations, such as point mutations and mutational signatures.

1. A kit comprising a container comprising a pool of TArget Capture Sequences (TACS), wherein the pool of TACS comprises a plurality of TACS families,
wherein each TACS family comprises a plurality of member sequences,
wherein each member sequence binds to the same genomic sequence of interest but has different start and/or stop positions with respect to a reference coordinate system for the genomic sequence of interest,
and further wherein:
(i) each member sequence within each TACS family is between 100-500 base pairs in length, each member sequence having a 5′ end and a 3′ end;
(ii) each member sequence binds to the same genomic sequence of interest at least 50 base pairs away, on both the 5′ end and the 3′ end, from regions harboring Copy Number Variations (CNVs), Segmental duplications or repetitive DNA elements; and
(iii) the GC content of the pool of TACS is between 19% and 80%, as determined by calculating the GC content of each member within each family of TACS.

2. The kit according to claim 1, wherein the start and/or stop positions of the member sequences are staggered by at least 3 base pairs.

3. The kit according to claim 1, wherein the pool of TACS comprises at least 2 TACS families.

4. The kit according to claim 1, wherein the pool of TACS comprises at least 50 different TACS families.

5. The kit according to claim 1, wherein each TACS family comprises at least 2 member sequences.

6. The kit according to claim 1, wherein the pool of TACS is fixed to a solid support.

7. The kit according to claim 6, wherein the pool of TACS are biotinylated and are bound to streptavidin-coated magnetic beads.

8. The kit according to claim 1, wherein the binding of the member sequences encompasses all chromosomes within the human genome.

9. The kit according to claim 1, wherein the member sequences bind to one or more genomic sequences of interest comprising a genetic abnormality.

10. The kit according to claim 1, wherein the start and/or stop positions for the member sequences within a TACS family are listed in table 1.

11. The kit according to claim 1, wherein the different member sequences have different % GC content.

12. The kit according to claim 1, wherein the kit is for use in IVF Pre-implantation Genetic Screening (PGS) and Diagnosis (PGD).

13. The kit according to claim 1, wherein the kit further comprises one or more of the following:
(i) one or more components for isolating cell free DNA from a biological sample;
(ii) one or more components for preparing the sequencing library comprising primers, adapters, buffers, linkers, restriction enzymes, ligation enzymes and polymerase enzymes;
(iii) one or more components for amplifying and/or sequencing the enriched library; and/or
(iv) software for performing statistical analysis.

The application's sequence listing, which the Patent Office published only in electronic form, follows.

SEQUENCE LISTING (2553 sequences)

SEQ ID NO: 1 - DNA, 20 bp, Homo sapiens
  source 1..20: mol_type = genomic DNA
tcttctcgttcaagatgccg

SEQ ID NO: 2 - DNA, 22 bp, Homo sapiens
  source 1..22: mol_type = genomic DNA
aaattacatgcaaggctaccac

SEQ ID NO: 3 - DNA, 21 bp, Homo sapiens
  source 1..21: mol_type = genomic DNA
acaggaagaaaggggagttac

SEQ ID NO: 4 - DNA, 20 bp, Homo sapiens
  source 1..20: mol_type = genomic DNA
ttcaggttgtgtgatgtgtc

SEQ ID NO: 5 - DNA, 20 bp, Homo sapiens
  source 1..20: mol_type = genomic DNA
taagcagaggttttgttgcc

SEQ ID NO: 6 - DNA, 20 bp, Homo sapiens
  source 1..20: mol_type = genomic DNA
gtgaagtatttgctgccacc

SEQ ID NO: 7 - DNA, 20 bp, Homo sapiens
  source 1..20: mol_type = genomic DNA
atggtcatctcaacagcaca

SEQ ID NO: 8 - DNA, 20 bp, Homo sapiens
  source 1..20: mol_type = genomic DNA
tccactgacgttgagattcg

SEQ ID NO: 9 - DNA, 20 bp, Homo sapiens
  source 1..20: mol_type = genomic DNA
cgaacctccttgacctctta

SEQ ID NO: 10 - DNA, 22 bp, Homo sapiens
  source 1..22: mol_type = genomic DNA
gttatgttgataggggaagctt

SEQ ID NO: 11 - DNA, 20 bp, Homo sapiens
  source 1..20: mol_type = genomic DNA
aagccctctactccatctgt

SEQ ID NO: 12 - DNA, 20 bp, Homo sapiens
  source 1..20: mol_type = genomic DNA
tcagaactcgtcagtggaag

SEQ ID NO: 13 - DNA, 19 bp, Homo sapiens
  source 1..19: mol_type = genomic DNA
gaagggccagacagcttat

SEQ ID NO: 14 - DNA, 21 bp, Homo sapiens
  source 1..21: mol_type = genomic DNA
atttgctttgtttttgtccct

SEQ ID NO: 15 - DNA, 21 bp, Homo sapiens
  source 1..21: mol_type = genomic DNA
gatcattgctttgtttggacc

SEQ ID NO: 16 - DNA, 21 bp, Homo sapiens
  source 1..21: mol_type = genomic DNA
aggagaggaaaaatcttgacc

SEQ ID NO: 17 - DNA, 20 bp, Homo sapiens
  source 1..20: mol_type = genomic DNA
ctgcctgcagccattattgt

SEQ ID NO: 18 - DNA, 22 bp, Homo sapiens
  source 1..22: mol_type = genomic DNA
ccttggggtatgtttgttatgt

SEQ ID NO: 19 - DNA, 22 bp, Homo sapiens
  source 1..22: mol_type = genomic DNA
actttttctgtatcagtcacgg

SEQ ID NO: 20 - DNA, 20 bp, Homo sapiens
  source 1..20: mol_type = genomic DNA
ctgcttttgtgtgttccctt

SEQ ID NO: 21 - DNA, 20 bp, Homo sapiens
  source 1..20: mol_type = genomic DNA
ccagttcctgtttttctgcc

SEQ ID NO: 22 - DNA, 21 bp, Homo sapiens
  source 1..21: mol_type = genomic DNA
gccttcactgatcctactttc

SEQ ID NO: 23 - DNA, 21 bp, Homo sapiens
  source 1..21: mol_type = genomic DNA
ggatatggggtaggtttttgt

SEQ ID NO: 24 - DNA, 20 bp, Homo sapiens
  source 1..20: mol_type = genomic DNA
actcatagaactggggcttt

SEQ ID NO: 25 - DNA, 20 bp, Homo sapiens
  source 1..20: mol_type = genomic DNA
ctttgtaggtcctccagaga

SEQ ID NO: 26 - DNA, 20 bp, Homo sapiens
  source 1..20: mol_type = genomic DNA
cctgttttcagtgggttgaa

SEQ ID NO: 27 - DNA, 20 bp, Homo sapiens
  source 1..20: mol_type = genomic DNA
ccacgttgtacctttccatg

SEQ ID NO: 28 - DNA, 21 bp, Homo sapiens
  source 1..21: mol_type = genomic DNA
gagattcaaaacagtggtggc

SEQ ID NO: 29 - DNA, 19 bp, Homo sapiens
  source 1..19: mol_type = genomic DNA
acaacactgtccttgggtt

SEQ ID NO: 30 - DNA, 20 bp, Homo sapiens
  source 1..20: mol_type = genomic DNA
taaatgtcctgtgtgctcgg

SEQ ID NO: 31 - DNA, 20 bp, Homo sapiens
  source 1..20: mol_type = genomic DNA
gacaggacacatggagagag

SEQ ID NO: 32 - DNA, 21 bp, Homo sapiens
  source 1..21: mol_type = genomic DNA
aactgatggtgatttgcatgt

SEQ ID NO: 33 - DNA, 20 bp, Homo sapiens
  source 1..20: mol_type = genomic DNA
ggcttctggaaacatcttgc

SEQ ID NO: 34 - DNA, 21 bp, Homo sapiens
  source 1..21: mol_type = genomic DNA
caatagaagtagggggtgagg

SEQ ID NO: 35 - DNA, 20 bp, Homo sapiens
  source 1..20: mol_type = genomic DNA
agctgggatgggttgtttat

SEQ ID NO: 36 - DNA, 20 bp, Homo sapiens
  source 1..20: mol_type = genomic DNA
gccagttgtcagaagaatcc

SEQ ID NO: 37 - DNA, 20 bp, Homo sapiens
  source 1..20: mol_type = genomic DNA
caactgcattccaaaacagc

SEQ ID NO: 38 - DNA, 21 bp, Homo sapiens
  source 1..21: mol_type = genomic DNA
gaagggaaacagtgagaaaga

SEQ ID NO: 39 - DNA, 20 bp, Homo sapiens
  source 1..20: mol_type = genomic DNA
tcaagcgccgtaagtatgta

SEQ ID NO: 40 - DNA, 20 bp, Homo sapiens
  source 1..20: mol_type = genomic DNA
taaccataacatccagggca

SEQ ID NO: 41 - DNA, 20 bp, Homo sapiens
  source 1..20: mol_type = genomic DNA
ttgtaagctggcacactgaa

SEQ ID NO: 42 - DNA, 20 bp, Homo sapiens
  source 1..20: mol_type = genomic DNA
ttaagaaagtgccgtgttgc

SEQ ID NO: 43 - DNA, 20 bp, Homo sapiens
  source 1..20: mol_type = genomic DNA
atgggtccatgaagagaagc

SEQ ID NO: 44 - DNA, 20 bp, Homo sapiens
  source 1..20: mol_type = genomic DNA
agttgtttccagtactgcca

SEQ ID NO: 45 - DNA, 20 bp, Homo sapiens
  source 1..20: mol_type = genomic DNA
gtatgctttcaagtgacgcc

SEQ ID NO: 46 - DNA, 21 bp, Homo sapiens
  source 1..21: mol_type = genomic DNA
gaagacaatgcaatgaggtgt

SEQ ID NO: 47 - DNA, 20 bp, Homo sapiens
  source 1..20: mol_type = genomic DNA
agacccaatgagaacaggaa

SEQ ID NO: 48 - DNA, 20 bp, Homo sapiens
  source 1..20: mol_type = genomic DNA
tgatggaggaagtgtgaagc

SEQ ID NO: 49 - DNA, 20 bp, Homo sapiens
  source 1..20: mol_type = genomic DNA
tggcttttctgtagtttggg

SEQ ID NO: 50 - DNA, 20 bp, Homo sapiens
  source 1..20: mol_type = genomic DNA
agcagcaagagttgagaaga

SEQ ID NO: 51 - DNA, 21 bp, Homo sapiens
  source 1..21: mol_type = genomic DNA
ggctttgaaaaatcaccatgg

SEQ ID NO: 52 - DNA, 20 bp, Homo sapiens
  source 1..20: mol_type = genomic DNA
agaggtttccatcgttgcta

SEQ ID NO: 53 - DNA, 20 bp, Homo sapiens
  source 1..20: mol_type = genomic DNA
aacagccccaaacttcctac

SEQ ID NO: 54 - DNA, 20 bp, Homo sapiens
  source 1..20: mol_type = genomic DNA
atcactgccaacaagccatt

SEQ ID NO: 55 - DNA, 20 bp, Homo sapiens
  source 1..20: mol_type = genomic DNA
tgagttgtgggggataaagg

SEQ ID NO: 56 - DNA, 20 bp, Homo sapiens
  source 1..20: mol_type = genomic DNA
tctgggcactttccttatga

SEQ ID NO: 57 - DNA, 20 bp, Homo sapiens
  source 1..20: mol_type = genomic DNA
gcagttttgaggggagaaga

SEQ ID NO: 58 - DNA, 19 bp, Homo sapiens
  source 1..19: mol_type = genomic DNA
ttcatgatgccacctcctc

SEQ ID NO: 59 - DNA, 20 bp, Homo sapiens
  source 1..20: mol_type = genomic DNA
gcccaaataccccttcagta

SEQ ID NO: 60 - DNA, 20 bp, Homo sapiens
  source 1..20: mol_type = genomic DNA
gcacctcaatcccgtacaat

SEQ ID NO: 61 - DNA, 20 bp, Homo sapiens
  source 1..20: mol_type = genomic DNA
gcgttttaagcagctgtgta

SEQ ID NO: 62 - DNA, 20 bp, Homo sapiens
  source 1..20: mol_type = genomic DNA
tctccagatcgaaacagcat

SEQ ID NO: 63 - DNA, 20 bp, Homo sapiens
  source 1..20: mol_type = genomic DNA
tcattcaaagccaagatgcc

SEQ ID NO: 64 - DNA, 20 bp, Homo sapiens
  source 1..20: mol_type = genomic DNA
acacgctacatagacactgg

SEQ ID NO: 65 - DNA, 20 bp, Homo sapiens
  source 1..20: mol_type = genomic DNA
caatcgaggtcacattcacc

SEQ ID NO: 66 - DNA, 21 bp, Homo sapiens
  source 1..21: mol_type = genomic DNA
tgacacgctgaagaaaatagc

SEQ ID NO: 67 - DNA, 20 bp, Homo sapiens
  source 1..20: mol_type = genomic DNA
ggagggaatggcagaagtaa

SEQ ID NO: 68 - DNA, 21 bp, Homo sapiens
  source 1..21: mol_type = genomic DNA
ggattttcagagcagaggttg

SEQ ID NO: 69 - DNA, 20 bp, Homo sapiens
  source 1..20: mol_type = genomic DNA
aagagttgcctgtacccttc

SEQ ID NO: 70 - DNA, 19 bp, Homo sapiens
  source 1..19: mol_type = genomic DNA
gtctctttactgggagcgt

SEQ ID NO: 71 - DNA, 20 bp, Homo sapiens
  source 1..20: mol_type = genomic DNA
acattgcccctgacaacata

SEQ ID NO: 72 - DNA, 19 bp, Homo sapiens
  source 1..19: mol_type = genomic DNA
tcattatctgaggagccgg

SEQ ID NO: 73 - DNA, 21 bp, Homo sapiens
  source 1..21: mol_type = genomic DNA
ggctccataatcttctgcaat

SEQ ID NO: 74 - DNA, 20 bp, Homo sapiens
  source 1..20: mol_type = genomic DNA
cgtacatctgatttgtgggt

SEQ ID NO: 75 - DNA, 21 bp, Homo sapiens
  source 1..21: mol_type = genomic DNA
tgccactgatgatacaaaagc

SEQ ID NO: 76 - DNA, 20 bp, Homo sapiens
  source 1..20: mol_type = genomic DNA
gaaacgtgtggtgtcctcta

SEQ ID NO: 77 - DNA, 20 bp, Homo sapiens
  source 1..20: mol_type = genomic DNA
agtgtttggggctctatcag

SEQ ID NO: 78 - DNA, 20 bp, Homo sapiens
  source 1..20: mol_type = genomic DNA
ctttcccttttgagtcctgc

SEQ ID NO: 79 - DNA, 20 bp, Homo sapiens
  source 1..20: mol_type = genomic DNA
tctcgcttaccttgctacat

SEQ ID NO: 80 - DNA, 20 bp, Homo sapiens
  source 1..20: mol_type = genomic DNA
aaagcgggaattggaacttt

SEQ ID NO: 81 - DNA, 20 bp, Homo sapiens
  source 1..20: mol_type = genomic DNA
ggggaacattgggaagagat

SEQ ID NO: 82 - DNA, 20 bp, Homo sapiens
  source 1..20: mol_type = genomic DNA
tctaccagctacaaacccat

SEQ ID NO: 83 - DNA, 20 bp, Homo sapiens
  source 1..20: mol_type = genomic DNA
tcagccaatacccatagcag

SEQ ID NO: 84 - DNA, 20 bp, Homo sapiens
  source 1..20: mol_type = genomic DNA
aatcagaggaagatgggtcg

SEQ ID NO: 85 - DNA, 20 bp, Homo sapiens
  source 1..20: mol_type = genomic DNA
gagaactccaccctgtcttt

SEQ ID NO: 86 - DNA, 20 bp, Homo sapiens
  source 1..20: mol_type = genomic DNA
gggagtgtgtgaatgtgtct

SEQ ID NO: 87 - DNA, 21 bp, Homo sapiens
  source 1..21: mol_type = genomic DNA
aagctttacatcatggcactg

SEQ ID NO: 88 - DNA, 20 bp, Homo sapiens
  source 1..20: mol_type = genomic DNA
aaaggtccataggctcacat

SEQ ID NO: 89 - DNA, 20 bp, Homo sapiens
  source 1..20: mol_type = genomic DNA
ttgaccaatgccattaagcc

SEQ ID NO: 90 - DNA, 21 bp, Homo sapiens
  source 1..21: mol_type = genomic DNA
accagggaaatgttagcttct

SEQ ID NO: 91 - DNA, 21 bp, Homo sapiens
  source 1..21: mol_type = genomic DNA
tgctctgttatggttggagtt

SEQ ID NO: 92 - DNA, 20 bp, Homo sapiens
  source 1..20: mol_type = genomic DNA
gaagcggcagtaattcagga

SEQ ID NO: 93 - DNA, 20 bp, Homo sapiens
  source 1..20: mol_type = genomic DNA
aactgtgtcctaagcagtga

SEQ ID NO: 94 - DNA, 20 bp, Homo sapiens
  source 1..20: mol_type = genomic DNA
gtcacctccagagctttcat

SEQ ID NO: 95 - DNA, 21 bp, Homo sapiens
  source 1..21: mol_type = genomic DNA
gaacaatgcaacctgagaact

SEQ ID NO: 96 - DNA, 21 bp, Homo sapiens
  source 1..21: mol_type = genomic DNA
tgattgtcctctaccatgcat

SEQ ID NO: 97 - DNA, 21 bp, Homo sapiens
  source 1..21: mol_type = genomic DNA
aggcttgaaacaccaccttta

SEQ ID NO: 98 - DNA, 20 bp, Homo sapiens
  source 1..20: mol_type = genomic DNA
ttgatttgttgggtggttgg

SEQ ID NO: 99 - DNA, 20 bp, Homo sapiens
  source 1..20: mol_type = genomic DNA
tgccaatctgaggtttttcc

SEQ ID NO: 100 - DNA, 20 bp, Homo sapiens
  source 1..20: mol_type = genomic DNA
actctgctttagggcttctg

SEQ ID NO: 101 - DNA, 20 bp, Homo sapiens
  source 1..20: mol_type = genomic DNA
gcagaaaagctcccaaacaa

SEQ ID NO: 102 - DNA, 20 bp, Homo sapiens
  source 1..20: mol_type = genomic DNA
gaaaagaggtggagagggag

SEQ ID NO: 103 - DNA, 20 bp, Homo sapiens
  source 1..20: mol_type = genomic DNA
aggacccttttgctgatttc

SEQ ID NO: 104 - DNA, 20 bp, Homo sapiens
  source 1..20: mol_type = genomic DNA
ctggcccaagtgcatacata

SEQ ID NO: 105 - DNA, 20 bp, Homo sapiens
  source 1..20: mol_type = genomic DNA
aaccagagagacaccttgac

SEQ ID NO: 106 - DNA, 20 bp, Homo sapiens
  source 1..20: mol_type = genomic DNA
tcctccctatctcctgtgac

SEQ ID NO: 107 - DNA, 20 bp, Homo sapiens
  source 1..20: mol_type = genomic DNA
actctgccagaaaagcctac

SEQ ID NO: 108 - DNA, 20 bp, Homo sapiens
  source 1..20: mol_type = genomic DNA
cctttgtcttgaagcctcct

SEQ ID NO: 109 - DNA, 20 bp, Homo sapiens
  source 1..20: mol_type = genomic DNA
ttgactgagcagagtagagc

SEQ ID NO: 110 - DNA, 22 bp, Homo sapiens
  source 1..22: mol_type = genomic DNA
ttctacctacaagcaaagagag

SEQ ID NO: 111 - DNA, 21 bp, Homo sapiens
  source 1..21: mol_type = genomic DNA
tcaccaacagaggatcaaact

SEQ ID NO: 112 - DNA, 20 bp, Homo sapiens
  source 1..20: mol_type = genomic DNA
ccgagggataacatacagct

SEQ ID NO: 113 - DNA, 20 bp, Homo sapiens
  source 1..20: mol_type = genomic DNA
cactagtcacagaagcaggt

SEQ ID NO: 114 - DNA, 20 bp, Homo sapiens
  source 1..20: mol_type = genomic DNA
gtagaaaccccgagacaact

SEQ ID NO: 115 - DNA, 20 bp, Homo sapiens
  source 1..20: mol_type = genomic DNA
caatttgctgttcagaggct

SEQ ID NO: 116 - DNA, 20 bp, Homo sapiens
  source 1..20: mol_type = genomic DNA
tcatgatgtggcttagtggg

SEQ ID NO: 117 - DNA, 20 bp, Homo sapiens
  source 1..20: mol_type = genomic DNA
tacacccacatgcatacaca

SEQ ID NO: 118 - DNA, 19 bp, Homo sapiens
  source 1..19: mol_type = genomic DNA
gaagtgtgcatgggagagt

SEQ ID NO: 119 - DNA, 21 bp, Homo sapiens
  source 1..21: mol_type = genomic DNA
tttgggtggctctatgttagg

SEQ ID NO: 120 - DNA, 20 bp, Homo sapiens
  source 1..20: mol_type = genomic DNA
ctccttgactcatttcccgt

SEQ ID NO: 121 - DNA, 20 bp, Homo sapiens
  source 1..20: mol_type = genomic DNA
agagtaccactgccaagaaa

SEQ ID NO: 122 - DNA, 20 bp, Homo sapiens
  source 1..20: mol_type = genomic DNA
ctgctagtctgtcaggagag

SEQ ID NO: 123 - DNA, 20 bp, Homo sapiens
  source 1..20: mol_type = genomic DNA
gggcagcagtataaacatcc

SEQ ID NO: 124 - DNA, 20 bp, Homo sapiens
  source 1..20: mol_type = genomic DNA
gacattcccttccattgagc

SEQ ID NO: 125 - DNA, 20 bp, Homo sapiens
  source 1..20: mol_type = genomic DNA
ttcctggtaaatgtgctggt

SEQ ID NO: 126 - DNA, 20 bp, Homo sapiens
  source 1..20: mol_type = genomic DNA
ggccagatttgcagtgattt

SEQ ID NO: 127 - DNA, 21 bp, Homo sapiens
  source 1..21: mol_type = genomic DNA
agaatcaacaacaatggcagg

SEQ ID NO: 128 - DNA, 21 bp, Homo sapiens
  source 1..21: mol_type = genomic DNA
ctctgaggaaagcttgtagga

SEQ ID NO: 129 - DNA, 20 bp, Homo sapiens
  source 1..20: mol_type = genomic DNA
aggttttcgttctgcttcag

SEQ ID NO: 130 - DNA, 19 bp, Homo sapiens
  source 1..19: mol_type = genomic DNA
cgggtcagtgattctagct

SEQ ID NO: 131 - DNA, 20 bp, Homo sapiens
  source 1..20: mol_type = genomic DNA
gtcactatggaatgggggtt

SEQ ID NO: 132 - DNA, 20 bp, Homo sapiens
  source 1..20: mol_type = genomic DNA
gcttcttccccgcaatatga

SEQ ID NO: 133 - DNA, 20 bp, Homo sapiens
  source 1..20: mol_type = genomic DNA
cggttcagagtcaatgccta

SEQ ID NO: 134 - DNA, 21 bp, Homo sapiens
  source 1..21: mol_type = genomic DNA
tacccaacaagccagagaaat

SEQ ID NO: 135 - DNA, 20 bp, Homo sapiens
  source 1..20: mol_type = genomic DNA
agagggaaagtgcaaggaat

SEQ ID NO: 136 - DNA, 20 bp, Homo sapiens
  source 1..20: mol_type = genomic DNA
gtttttcagcacactgtccc

SEQ ID NO: 137 - DNA, 20 bp, Homo sapiens
  source 1..20: mol_type = genomic DNA
accacattactcacaaccct

SEQ ID NO: 138 - DNA, 20 bp, Homo sapiens
  source 1..20: mol_type = genomic DNA
aagcccttttcatctccaca

SEQ ID NO: 139 - DNA, 20 bp, Homo sapiens
  source 1..20: mol_type = genomic DNA
ccagagctgagacaactact

SEQ ID NO: 140 - DNA, 20 bp, Homo sapiens
  source 1..20: mol_type = genomic DNA
gaagcaattcctcacaccac

SEQ ID NO: 141 - DNA, 20 bp, Homo sapiens
  source 1..20: mol_type = genomic DNA
ttcagtcagaatgaggagcc

SEQ ID NO: 142 - DNA, 20 bp, Homo sapiens
  source 1..20: mol_type = genomic DNA
ctcctctcccctctgatttt

SEQ ID NO: 143 - DNA, 21 bp, Homo sapiens
  source 1..21: mol_type = genomic DNA
ttttaaagcgacagtcacacg

SEQ ID NO: 144 - DNA, 20 bp, Homo sapiens
  source 1..20: mol_type = genomic DNA
tcctctgccttctacccttt

SEQ ID NO: 145 - DNA, 20 bp, Homo sapiens
  source 1..20: mol_type = genomic DNA
tgttgtgccttttgttctgg

SEQ ID NO: 146 - DNA, 22 bp, Homo sapiens
  source 1..22: mol_type = genomic DNA
ttaggaggtaaggctggaaaaa

SEQ ID NO: 147 - DNA, 21 bp, Homo sapiens
  source 1..21: mol_type = genomic DNA
ctgtcagcaatttcaggtcag

SEQ ID NO: 148 - DNA, 20 bp, Homo sapiens
  source 1..20: mol_type = genomic DNA
agacaaaggcttcacggaac

SEQ ID NO: 149 - DNA, 20 bp, Homo sapiens
  source 1..20: mol_type = genomic DNA
ttcctctgtgtcttgaaggt

SEQ ID NO: 150 - DNA, 20 bp, Homo sapiens
  source 1..20: mol_type = genomic DNA
atcaatgcaggtgagtgtga

SEQ ID NO: 151 - DNA, 20 bp, Homo sapiens
  source 1..20: mol_type = genomic DNA
cactccacataagcctcaga

SEQ ID NO: 152 - DNA, 20 bp, Homo sapiens
  source 1..20: mol_type = genomic DNA
aggatgtagttgggtgagga

SEQ ID NO: 153 - DNA, 20 bp, Homo sapiens
  source 1..20: mol_type = genomic DNA
cagtcatcacggggagatac

SEQ ID NO: 154 - DNA, 20 bp, Homo sapiens
  source 1..20: mol_type = genomic DNA
gacagatatttgtgcagggt

SEQ ID NO: 155 - DNA, 20 bp, Homo sapiens
  source 1..20: mol_type = genomic DNA
tcctagcccttacctttcct

SEQ ID NO: 156 - DNA, 20 bp, Homo sapiens
  source 1..20: mol_type = genomic DNA
agcctgaatgtcactgatca

SEQ ID NO: 157 - DNA, 19 bp, Homo sapiens
  source 1..19: mol_type = genomic DNA
actcatcacttctggctgc

SEQ ID NO: 158 - DNA, 20 bp, Homo sapiens
  source 1..20: mol_type = genomic DNA
tcttgtgtttcctgccctat

SEQ ID NO: 159 - DNA, 20 bp, Homo sapiens
  source 1..20: mol_type = genomic DNA
ttgctgtggatgagaatgga

SEQ ID NO: 160 - DNA, 20 bp, Homo sapiens
  source 1..20: mol_type = genomic DNA
tgagggcagaaagaaacaga

SEQ ID NO: 161 - DNA, 20 bp, Homo sapiens
  source 1..20: mol_type = genomic DNA
ggggtcacacatcacttttc

SEQ ID NO: 162 - DNA, 20 bp, Homo sapiens
  source 1..20: mol_type = genomic DNA
atagggtcacaatccactgc

SEQ ID NO: 163 - DNA, 20 bp, Homo sapiens
  source 1..20: mol_type = genomic DNA
atattgagccccgcatgtta

SEQ ID NO: 164 - DNA, 20 bp, Homo sapiens
  source 1..20: mol_type = genomic DNA
ggttgcaggagaaagaacat

SEQ ID NO: 165 - DNA, 20 bp, Homo sapiens
  source 1..20: mol_type = genomic DNA
tgccatgtaattgccaagat

SEQ ID NO: 166 - DNA, 19 bp, Homo sapiens
  source 1..19: mol_type = genomic DNA
cctgttctccatccctctg

SEQ ID NO: 167 - DNA, 21 bp, Homo sapiens
  source 1..21: mol_type = genomic DNA
tcacaaactacccaacaccta

SEQ ID NO: 168 - DNA, 21 bp, Homo sapiens
  source 1..21: mol_type = genomic DNA
cagaattagttggggagctgt

SEQ ID NO: 169 - DNA, 20 bp, Homo sapiens
  source 1..20: mol_type = genomic DNA
gccatctcctgaaatagtgc

SEQ ID NO: 170 - DNA, 20 bp, Homo sapiens
  source 1..20: mol_type = genomic DNA
gcaagtgttcccatctagaa

SEQ ID NO: 171 - DNA, 20 bp, Homo sapiens
  source 1..20: mol_type = genomic DNA
attgatacccctctccccag

SEQ ID NO: 172 - DNA, 19 bp, Homo sapiens
  source 1..19: mol_type = genomic DNA
aagtaagctgtctcctggc

SEQ ID NO: 173 - DNA, 20 bp, Homo sapiens
  source 1..20: mol_type = genomic DNA
aggttggttggcatgaagaa

SEQ ID NO: 174 - DNA, 20 bp, Homo sapiens
  source 1..20: mol_type = genomic DNA
agcagagtttcaagacaagc

SEQ ID NO: 175 - DNA, 20 bp, Homo sapiens
  source 1..20: mol_type = genomic DNA
ttttacacagcaggcctctt

SEQ ID NO: 176 - DNA, 21 bp, Homo sapiens
  source 1..21: mol_type = genomic DNA
gcaactccaaattatcagggc

SEQ ID NO: 177 - DNA, 20 bp, Homo sapiens
  source 1..20: mol_type = genomic DNA
cagcaccttcccttagcaaa

SEQ ID NO: 178 - DNA, 20 bp, Homo sapiens
  source 1..20: mol_type = genomic DNA
cttgttgtcttgtagccctg

SEQ ID NO: 179 - DNA, 20 bp, Homo sapiens
  source 1..20: mol_type = genomic DNA
cacagatacagacgtccaca

SEQ ID NO: 180 - DNA, 21 bp, Homo sapiens
  source 1..21: mol_type = genomic DNA
agctcagcaattaaacagtcc

SEQ ID NO: 181 - DNA, 20 bp, Homo sapiens
  source 1..20: mol_type = genomic DNA
tgttgagagtgccagagatg

SEQ ID NO: 182 - DNA, 20 bp, Homo sapiens
  source 1..20: mol_type = genomic DNA
cttccaccttctgccaatga

SEQ ID NO: 183 - DNA, 20 bp, Homo sapiens
  source 1..20: mol_type = genomic DNA
ttctgacatttgcaagcacc

SEQ ID NO: 184 - DNA, 20 bp, Homo sapiens
  source 1..20: mol_type = genomic DNA
ctgttgctagtttcttgggc

SEQ ID NO: 185 - DNA, 19 bp, Homo sapiens
  source 1..19: mol_type = genomic DNA
ttttccagtcccagcacat

SEQ ID NO: 186 - DNA, 21 bp, Homo sapiens
  source 1..21: mol_type = genomic DNA
tctctctcttcctgaaacagc

SEQ ID NO: 187 - DNA, 21 bp, Homo sapiens
  source 1..21: mol_type = genomic DNA
aacctctgctttgtgtagtga

SEQ ID NO: 188 - DNA, 20 bp, Homo sapiens
  source 1..20: mol_type = genomic DNA
gagagaatgcaaggttcagc

SEQ ID NO: 189 - DNA, 20 bp, Homo sapiens
  source 1..20: mol_type = genomic DNA
tacagcatcaaagaggaagc

SEQ ID NO: 190 - DNA, 20 bp, Homo sapiens
  source 1..20: mol_type = genomic DNA
gaggggatgaggggaaaaag

SEQ ID NO: 191 - DNA, 20 bp, Homo sapiens
  source 1..20: mol_type = genomic DNA
catgacctctgacggatctg

SEQ ID NO: 192 - DNA, 19 bp, Homo sapiens
  source 1..19: mol_type = genomic DNA
aggcaatgaggtcaaggac

SEQ ID NO: 193 - DNA, 20 bp, Homo sapiens
  source 1..20: mol_type = genomic DNA
atgatggccccaacttcttc

SEQ ID NO: 194 - DNA, 20 bp, Homo sapiens
  source 1..20: mol_type = genomic DNA
ttctagacactgagggagca

SEQ ID NO: 195 - DNA, 20 bp, Homo sapiens
  source 1..20: mol_type = genomic DNA
aacgctacactttacgagct

SEQ ID NO: 196 - DNA, 20 bp, Homo sapiens
  source 1..20: mol_type = genomic DNA
tcaacactacctgccaatca

SEQ ID NO: 197 - DNA, 19 bp, Homo sapiens
  source 1..19: mol_type = genomic DNA
tgccgacacaaaagaatgc

SEQ ID NO: 198 - DNA, 19 bp, Homo sapiens
  source 1..19: mol_type = genomic DNA
aaagtgttcctccctgctg

SEQ ID NO: 199 - DNA, 20 bp, Homo sapiens
  source 1..20: mol_type = genomic DNA
aggagcaaaatagtctggct

SEQ ID NO: 200 - DNA, 21 bp, Homo sapiens
  source 1..21: mol_type = genomic DNA
accactcttgaatcattgcag

SEQ ID NO: 201 - DNA, 21 bp, Homo sapiens
  source 1..21: mol_type = genomic DNA
ccagccaattttctctttccc

SEQ ID NO: 202 - DNA, 20 bp, Homo sapiens
  source 1..20: mol_type = genomic DNA
actgtccctactgccaattt

SEQ ID NO: 203 - DNA, 21 bp, Homo sapiens
  source 1..21: mol_type = genomic DNA
atctggtttgaacttgccaac

SEQ ID NO: 204 - DNA, 20 bp, Homo sapiens
  source 1..20: mol_type = genomic DNA
cactctgaatagctctcccc

SEQ ID NO: 205 - DNA, 20 bp, Homo sapiens
  source 1..20: mol_type = genomic DNA
ttatccgggacagtttcagg

SEQ ID NO: 206 - DNA, 20 bp, Homo sapiens
  source 1..20: mol_type = genomic DNA
gaatcttttggcccacactg

SEQ ID NO: 207 - DNA, 20 bp, Homo sapiens
  source 1..20: mol_type = genomic DNA
gtcagacacacttagctggt

SEQ ID NO: 208 - DNA, 20 bp, Homo sapiens
  source 1..20: mol_type = genomic DNA
acacatttcaccttcaccct

SEQ ID NO: 209 - DNA, 20 bp, Homo sapiens
  source 1..20: mol_type = genomic DNA
gcactaatccaggggcttaa

SEQ ID NO: 210 - DNA, 20 bp, Homo sapiens
  source 1..20: mol_type = genomic DNA
ccccttaccaccacttctac

SEQ ID NO: 211 - DNA, 20 bp, Homo sapiens
  source 1..20: mol_type = genomic DNA
ttcagatcccttaagcacgc

SEQ ID NO: 212 - DNA, 20 bp, Homo sapiens
  source 1..20: mol_type = genomic DNA
acctaaggcctcaaattcca

SEQ ID NO: 213 - DNA, 20 bp, Homo sapiens
  source 1..20: mol_type = genomic DNA
cagaccacgggcataagaaa

SEQ ID NO: 214 - DNA, 20 bp, Homo sapiens
  source 1..20: mol_type = genomic DNA
tggatgtgtggatttggaga

SEQ ID NO: 215 - DNA, 19 bp, Homo sapiens
  source 1..19: mol_type = genomic DNA
ctggctgtcttctgggaaa

SEQ ID NO: 216 - DNA, 21 bp, Homo sapiens
  source 1..21: mol_type = genomic DNA
caagcagaactgagaagagtc

SEQ ID NO: 217 - DNA, 20 bp, Homo sapiens
  source 1..20: mol_type = genomic DNA
agtggaacgaggattgtgtt

SEQ ID NO: 218 - DNA, 20 bp, Homo sapiens
  source 1..20: mol_type = genomic DNA
ctcccatctgaaactgctga

SEQ ID NO: 219 - DNA, 19 bp, Homo sapiens
  source 1..19: mol_type = genomic DNA
acatcacaaccaccctgac

SEQ ID NO: 220 - DNA, 20 bp, Homo sapiens
  source 1..20: mol_type = genomic DNA
gtgttgacctgatttgccaa

SEQ ID NO: 221 - DNA, 20 bp, Homo sapiens
  source 1..20: mol_type = genomic DNA
gaacaaagaggaacagagcc

SEQ ID NO: 222 - DNA, 20 bp, Homo sapiens
  source 1..20: mol_type = genomic DNA
ttcatgattccagggtcctc

SEQ ID NO: 223 - DNA, 22 bp, Homo sapiens
  source 1..22: mol_type = genomic DNA
ggacggatttagtgtacattgg

SEQ ID NO: 224 - DNA, 20 bp, Homo sapiens
  source 1..20: mol_type = genomic DNA
tttccttccaacaccacaga

SEQ ID NO: 225 - DNA, 20 bp, Homo sapiens
  source 1..20: mol_type = genomic DNA
tccttagggttctgcgaaat

SEQ ID NO: 226 - DNA, 20 bp, Homo sapiens
  source 1..20: mol_type = genomic DNA
ggaaactccctgccttctac

SEQ ID NO: 227 - DNA, 20 bp, Homo sapiens
  source 1..20: mol_type = genomic DNA
tcttccaaacaccaggtcta

SEQ ID NO: 228 - DNA, 19 bp, Homo sapiens
  source 1..19: mol_type = genomic DNA
actcaatggaaggaagggc

SEQ ID NO: 229 - DNA, 20 bp, Homo sapiens
  source 1..20: mol_type = genomic DNA
aaggacttgtgctgtattgc

SEQ ID NO: 230 - DNA, 20 bp, Homo sapiens
  source 1..20: mol_type = genomic DNA
gacgggagccagtattctac

SEQ ID NO: 231 - DNA, 20 bp, Homo sapiens
  source 1..20: mol_type = genomic DNA
gggattgagagcttggttct

SEQ ID NO: 232 - DNA, 20 bp, Homo sapiens
  source 1..20: mol_type = genomic DNA
ctccccaccaagatgttcaa

SEQ ID NO: 233 - DNA, 20 bp, Homo sapiens
  source 1..20: mol_type = genomic DNA
gttttgggtcatgcagtgtt

SEQ ID NO: 234 - DNA, 20 bp, Homo sapiens
  source 1..20: mol_type = genomic DNA
gacaaaaacacttgccagac

SEQ ID NO: 235 - DNA, 20 bp, Homo sapiens
  source 1..20: mol_type = genomic DNA
aaccatggctttgcaagtac

SEQ ID NO: 236 - DNA, 20 bp, Homo sapiens
  source 1..20: mol_type = genomic DNA
ggaaccctctgctattttgc

SEQ ID NO: 237 - DNA, 20 bp, Homo sapiens
  source 1..20: mol_type = genomic DNA
tactccttgtgtgaacccct

SEQ ID NO: 238 - DNA, 20 bp, Homo sapiens
  source 1..20: mol_type = genomic DNA
acctttaccccataccatcc

SEQ ID NO: 239 - DNA, 20 bp, Homo sapiens
  source 1..20: mol_type = genomic DNA
cattcctttggttggtgtcc

SEQ ID NO: 240 - DNA, 20 bp, Homo sapiens
  source 1..20: mol_type = genomic DNA
ctaatgggcctgttgttcct

SEQ ID NO: 241 - DNA, 20 bp, Homo sapiens
  source 1..20: mol_type = genomic DNA
caacctacctgcccatagtt

SEQ ID NO: 242 - DNA, 20 bp, Homo sapiens
  source 1..20: mol_type = genomic DNA
cgtagcaaattatggcgagg

SEQ ID NO: 243 - DNA, 20 bp, Homo sapiens
  source 1..20: mol_type = genomic DNA
ggtcagaagggaaagggttc

SEQ ID NO: 244 - DNA, 20 bp, Homo sapiens
  source 1..20: mol_type = genomic DNA
ccagattaaaacgtggtgcc

SEQ ID NO: 245 - DNA, 20 bp, Homo sapiens
  source 1..20: mol_type = genomic DNA
cccacaactataggtcgcat

SEQ ID NO: 246 - DNA, 21 bp, Homo sapiens
  source 1..21: mol_type = genomic DNA
agttgttccatttgtaccagc

SEQ ID NO: 247 - DNA, 19 bp, Homo sapiens
  source 1..19: mol_type = genomic DNA
ttggctgcactttgagtca

SEQ ID NO: 248 - DNA, 20 bp, Homo sapiens
  source 1..20: mol_type = genomic DNA
cagatggcccattgtaacaa

SEQ ID NO: 249 - DNA, 19 bp, Homo sapiens
  source 1..19: mol_type = genomic DNA
tattgaggttcccgtgctg

SEQ ID NO: 250 - DNA, 20 bp, Homo sapiens
  source 1..20: mol_type = genomic DNA
agaatgtgaagtggctccat

SEQ ID NO: 251 - DNA, 20 bp, Homo sapiens
  source 1..20: mol_type = genomic DNA
tttgggtttgtgtgtgtgtg

SEQ ID NO: 252 - DNA, 20 bp, Homo sapiens
  source 1..20: mol_type = genomic DNA
aggaatctctctctgccaag

SEQ ID NO: 253 - DNA, 20 bp, Homo sapiens
  source 1..20: mol_type = genomic DNA
tcttcaaggcaggtcatagg

SEQ ID NO: 254 - DNA, 21 bp, Homo sapiens
  source 1..21: mol_type = genomic DNA
gaaacctaagacgttccactg

SEQ ID NO: 255 - DNA, 20 bp, Homo sapiens
  source 1..20: mol_type = genomic DNA
gagtgaagggattggagcaa

SEQ ID NO: 256 - DNA, 20 bp, Homo sapiens
  source 1..20: mol_type = genomic DNA
atgtctcaggctaggtgttc

SEQ ID NO: 257 - DNA, 20 bp, Homo sapiens
  source 1..20: mol_type = genomic DNA
acactcacaaagcccagtta

SEQ ID NO: 258 - DNA, 20 bp, Homo sapiens
  source 1..20: mol_type = genomic DNA
gtgcagactcatgttatggc

SEQ ID NO: 259 - DNA, 20 bp, Homo sapiens
  source 1..20: mol_type = genomic DNA
aggatctcaaagcaccacag

SEQ ID NO: 260 - DNA, 20 bp, Homo sapiens
  source 1..20: mol_type = genomic DNA
aacgggaagagggaaacttt

SEQ ID NO: 261 - DNA, 20 bp, Homo sapiens
  source 1..20: mol_type = genomic DNA
atgttcaacagagtcaggct

SEQ ID NO: 262 - DNA, 20 bp, Homo sapiens
  source 1..20: mol_type = genomic DNA
cagtaacagtccagggtctt

SEQ ID NO: 263 - DNA, 20 bp, Homo sapiens
  source 1..20: mol_type = genomic DNA
agtctgggagcctagaatca

SEQ ID NO: 264 - DNA, 22 bp, Homo sapiens
  source 1..22: mol_type = genomic DNA
cattgtagtttcaggacaccaa

SEQ ID NO: 265 - DNA, 20 bp, Homo sapiens
  source 1..20: mol_type = genomic DNA
accacagaatgacttgcagc

SEQ ID NO: 266 - DNA, 20 bp, Homo sapiens
  source 1..20: mol_type = genomic DNA
tttcacgtgtaacaggagca

SEQ ID NO: 267 - DNA, 20 bp, Homo sapiens
  source 1..20: mol_type = genomic DNA
tgctacagggaaaatggtct

SEQ ID NO: 268 - DNA, 20 bp, Homo sapiens
  source 1..20: mol_type = genomic DNA
tccactgcttagtttgcctt

SEQ ID NO: 269 - DNA, 20 bp, Homo sapiens
  source 1..20: mol_type = genomic DNA
acaggtggggagaaaaggta

SEQ ID NO: 270 - DNA, 20 bp, Homo sapiens
  source 1..20: mol_type = genomic DNA
ctgccactactacacagcta

SEQ ID NO: 271 - DNA, 20 bp, Homo sapiens
  source 1..20: mol_type = genomic DNA
atgggtctctggaatgcatg

SEQ ID NO: 272 - DNA, 20 bp, Homo sapiens
  source 1..20: mol_type = genomic DNA
agttctccacagcacatcat

SEQ ID NO: 273 - DNA, 20 bp, Homo sapiens
  source 1..20: mol_type = genomic DNA
tctttcatctcagctctgca

SEQ ID NO: 274 - DNA, 20 bp, Homo sapiens
  source 1..20: mol_type = genomic DNA
ccgaacagtattttgagggg

SEQ ID NO: 275 - DNA, 20 bp, Homo sapiens
  source 1..20: mol_type = genomic DNA
tttggctgtttcctgtttcc

SEQ ID NO: 276 - DNA, 20 bp, Homo sapiens
  source 1..20: mol_type = genomic DNA
acctaacttgccttgtcctt

SEQ ID NO: 277 - DNA, 20 bp, Homo sapiens
  source 1..20: mol_type = genomic DNA
acaggagaacaagcagcata

SEQ ID NO: 278 - DNA, 21 bp, Homo sapiens
  source 1..21: mol_type = genomic DNA
cagcctagtatatgggaacgt

SEQ ID NO: 279 - DNA, 23 bp, Homo sapiens
  source 1..23: mol_type = genomic DNA
acccatatgtagtatcgctcttg

SEQ ID NO: 280 - DNA, 21 bp, Homo sapiens
  source 1..21: mol_type = genomic DNA
tatgggtttttctgctccact

SEQ ID NO: 281 - DNA, 20 bp, Homo sapiens
  source 1..20: mol_type = genomic DNA
aaatgtgagggagagtcgtc

SEQ ID NO: 282 - DNA, 19 bp, Homo sapiens
  source 1..19: mol_type = genomic DNA
gcaggacccttcagcatta

SEQ ID NO: 283 - DNA, 20 bp, Homo sapiens
  source 1..20: mol_type = genomic DNA
gactggatgatgcaaaggtg

SEQ ID NO: 284 - DNA, 20 bp, Homo sapiens
  source 1..20: mol_type = genomic DNA
aacatttgcagggggatcaa

SEQ ID NO: 285 - DNA, 20 bp, Homo sapiens
  source 1..20: mol_type = genomic DNA
aaagatgcctccttgtgtct

SEQ ID NO: 286 - DNA, 20 bp, Homo sapiens
  source 1..20: mol_type = genomic DNA
aagttatctgcccagggaaa

SEQ ID NO: 287 - DNA, 20 bp, Homo sapiens
  source 1..20: mol_type = genomic DNA
tcctggctagttttgctgaa

SEQ ID NO: 288 - DNA, 20 bp, Homo sapiens
  source 1..20: mol_type = genomic DNA
ctccttgcttgcctttacac

SEQ ID NO: 289 - DNA, 20 bp, Homo sapiens
  source 1..20: mol_type = genomic DNA
agccttaattccccatgcat

SEQ ID NO: 290 - DNA, 20 bp, Homo sapiens
  source 1..20: mol_type = genomic DNA
tttttctgtggagtgtggct

SEQ ID NO: 291 - DNA, 20 bp, Homo sapiens
  source 1..20: mol_type = genomic DNA
aaagagtcaaccatgcactg

SEQ ID NO: 292 - DNA, 20 bp, Homo sapiens
  source 1..20: mol_type = genomic DNA
ggtgaagcagcctgaataaa

SEQ ID NO: 293 - DNA, 19 bp, Homo sapiens
  source 1..19: mol_type = genomic DNA
tctttgtaccaagctgcca

SEQ ID NO: 294 - DNA, 20 bp, Homo sapiens
  source 1..20: mol_type = genomic DNA
gcttctactttcccctccag

SEQ ID NO: 295 - DNA, 20 bp, Homo sapiens
  source 1..20: mol_type = genomic DNA
agaaaagccaacctcctctt

SEQ ID NO: 296 - DNA, 20 bp, Homo sapiens
  source 1..20: mol_type = genomic DNA
ccagggtactaaaaggggac

SEQ ID NO: 297 - DNA, 20 bp, Homo sapiens
  source 1..20: mol_type = genomic DNA
ttgtgggtcaatgtcaacac

SEQ ID NO: 298 - DNA, 20 bp, Homo sapiens
  source 1..20: mol_type = genomic DNA
agaaaaggtggaggaaggga

SEQ ID NO: 299 - DNA, 21 bp, Homo sapiens
  source 1..21: mol_type = genomic DNA
ggagttgtttacaggtggact

SEQ ID NO: 300 - DNA, 21 bp, Homo sapiens
  source 1..21: mol_type = genomic DNA
tagcttccaattcacaggtca

SEQ ID NO: 301 - DNA, 20 bp, Homo sapiens
  source 1..20: mol_type = genomic DNA
ttaaatgcgccaagtcccta

SEQ ID NO: 302 - DNA, 20 bp, Homo sapiens
  source 1..20: mol_type = genomic DNA
atttcctgggtcaagctctt

SEQ ID NO: 303 - DNA, 20 bp, Homo sapiens
  source 1..20: mol_type = genomic DNA
cttggaccaggaatgctcta

SEQ ID NO: 304 - DNA, 20 bp, Homo sapiens
  source 1..20: mol_type = genomic DNA
aggcagtcagatccacctat

SEQ ID NO: 305 - DNA, 20 bp, Homo sapiens
  source 1..20: mol_type = genomic DNA
aaaattgcctgctgtttgga

SEQ ID NO: 306 - DNA, 20 bp, Homo sapiens
  source 1..20: mol_type = genomic DNA
gcaccatcatgaaacctcct

SEQ ID NO: 307 - DNA, 20 bp, Homo sapiens
  source 1..20: mol_type = genomic DNA
ataggccagtctcaggtaga

SEQ ID NO: 308 - DNA, 20 bp, Homo sapiens
  source 1..20: mol_type = genomic DNA
agattgcagcctacccaaag

SEQ ID NO: 309 - DNA, 20 bp, Homo sapiens
  source 1..20: mol_type = genomic DNA
ttgactgaagtgttccaggt

SEQ ID NO: 310 - DNA, 20 bp, Homo sapiens
  source 1..20: mol_type = genomic DNA
gcttctttcaaccatccacc

SEQ ID NO: 311 - DNA, 20 bp, Homo sapiens
  source 1..20: mol_type = genomic DNA
gcagcactcaactattccac

SEQ ID NO: 312 - DNA, 20 bp, Homo sapiens
  source 1..20: mol_type = genomic DNA
caggagttatggcaccagtg

SEQ ID NO: 313 - DNA, 20 bp, Homo sapiens
  source 1..20: mol_type = genomic DNA
gagagtgtggaggcagaaaa

SEQ ID NO: 314 - DNA, 20 bp, Homo sapiens
  source 1..20: mol_type = genomic DNA
gcccaacttattttccagct

SEQ ID NO: 315 - DNA, 21 bp, Homo sapiens
  source 1..21: mol_type = genomic DNA
tcaagccccttagattgaaca

SEQ ID NO: 316 - DNA, 20 bp, Homo sapiens
  source 1..20: mol_type = genomic DNA
gctgggcatgtagaactcaa

SEQ ID NO: 317 - DNA, 20 bp, Homo sapiens
  source 1..20: mol_type = genomic DNA
gggaaattgtcaagggcttt

SEQ ID NO: 318 - DNA, 21 bp, Homo sapiens
  source 1..21: mol_type = genomic DNA
cttagttgctgttgtgcttct

SEQ ID NO: 319 - DNA, 20 bp, Homo sapiens
  source 1..20: mol_type = genomic DNA
agttgtagctgtatctgggt

SEQ ID NO: 320 - DNA, 20 bp, Homo sapiens
  source 1..20: mol_type = genomic DNA
agctgagtcatgtttaaggc

SEQ ID NO: 321 - DNA, 21 bp, Homo sapiens
  source 1..21: mol_type = genomic DNA
caattcagactttgcccaaac

SEQ ID NO: 322 - DNA, 21 bp, Homo sapiens
  source 1..21: mol_type = genomic DNA
caatcattcccacagttccaa

SEQ ID NO: 323 - DNA, 20 bp, Homo sapiens
  source 1..20: mol_type = genomic DNA
ctgtgatggtccattcaagg

SEQ ID NO: 324 - DNA, 20 bp, Homo sapiens
  source 1..20: mol_type = genomic DNA
tagctggaaattgcaaggag

SEQ ID NO: 325 - DNA, 19 bp, Homo sapiens
  source 1..19: mol_type = genomic DNA
tctgttcacctgagccttt

SEQ ID NO: 326 - DNA, 20 bp, Homo sapiens
  source 1..20: mol_type = genomic DNA
taacttggactgtgaaccca

SEQ ID NO: 327 - DNA, 20 bp, Homo sapiens
  source 1..20: mol_type = genomic DNA
cgcaacaggatgaaggaaat

SEQ ID NO: 328 - DNA, 20 bp, Homo sapiens
  source 1..20: mol_type = genomic DNA
gactcacactctgaaagcct

SEQ ID NO: 329 - DNA, 21 bp, Homo sapiens
  source 1..21: mol_type = genomic DNA
aatttaggtagcactgacccc

SEQ ID NO: 330 - DNA, 20 bp, Homo sapiens
  source 1..20: mol_type = genomic DNA
ctggggaattaggaagcaga

SEQ ID NO: 331 - DNA, 19 bp, Homo sapiens
  source 1..19: mol_type = genomic DNA
atgacaaggctggctcatc

SEQ ID NO: 332 - DNA, 20 bp, Homo sapiens
  source 1..20: mol_type = genomic DNA
ttagttttggcatgtggtgg

SEQ ID NO: 333 - DNA, 20 bp, Homo sapiens
  source 1..20: mol_type = genomic DNA
tggtgagggagtgttctttt

SEQ ID NO: 334 - DNA, 20 bp, Homo sapiens
  source 1..20: mol_type = genomic DNA
tcattgggggagtcattcac

SEQ ID NO: 335 - DNA, 20 bp, Homo sapiens
  source 1..20: mol_type = genomic DNA
gaagtggtgtgatgagggtg

SEQ ID NO: 336 - DNA, 20 bp, Homo sapiens
  source 1..20: mol_type = genomic DNA
aagttaggccctgttaagca

SEQ ID NO: 337 - DNA, 20 bp, Homo sapiens
  source 1..20: mol_type = genomic DNA
tgttggtcggagtcagaaat

SEQ ID NO: 338 - DNA, 20 bp, Homo sapiens
  source 1..20: mol_type = genomic DNA
gtaaaagaggttgggatgcc

SEQ ID NO: 339 - DNA, 20 bp, Homo sapiens
  source 1..20: mol_type = genomic DNA
cgttggacatggatcatacc

SEQ ID NO: 340 - DNA, 22 bp, Homo sapiens
  source 1..22: mol_type = genomic DNA
tcacaacaagggaaatagccta

SEQ ID NO: 341 - DNA, 20 bp, Homo sapiens
  source 1..20: mol_type = genomic DNA
tagtcaggtaaacaacgcct

SEQ ID NO: 342 - DNA, 21 bp, Homo sapiens
  source 1..21: mol_type = genomic DNA
tctgtttcttgtttggctgag

SEQ ID NO: 343 - DNA, 20 bp, Homo sapiens
  source 1..20: mol_type = genomic DNA
acataggtcacacaaagggt

SEQ ID NO: 344 - DNA, 20 bp, Homo sapiens
  source 1..20: mol_type = genomic DNA
gtgtgacacttttctgcctt

SEQ ID NO: 345 - DNA, 21 bp, Homo sapiens
  source 1..21: mol_type = genomic DNA
ctggaaatagaaggcctttgc

SEQ ID NO: 346 - DNA, 20 bp, Homo sapiens
  source 1..20: mol_type = genomic DNA
tcttggtctgggaataagcc

SEQ ID NO: 347 - DNA, 20 bp, Homo sapiens
  source 1..20: mol_type = genomic DNA
tgcccctatgaacaacagaa

SEQ ID NO: 348 - DNA, 20 bp, Homo sapiens
  source 1..20: mol_type = genomic DNA
tgaacgtcttgcttacccac

SEQ ID NO: 349 - DNA, 19 bp, Homo sapiens
  source 1..19: mol_type = genomic DNA
gaaggaaggcagaggtcaa

SEQ ID NO: 350 - DNA, 20 bp, Homo sapiens
  source 1..20: mol_type = genomic DNA
cttccacaaagtcctgcaac

SEQ ID NO: 351 - DNA, 20 bp, Homo sapiens
  source 1..20: mol_type = genomic DNA
atgtgaaccattgagaggca

SEQ ID NO: 352 - DNA, 20 bp, Homo sapiens
  source 1..20: mol_type = genomic DNA
aagagaaactaccctggcaa

SEQ ID NO: 353 - DNA, 20 bp, Homo sapiens
  source 1..20: mol_type = genomic DNA
gcatgtagttcagttcaggc

SEQ ID NO: 354 - DNA, 20 bp, Homo sapiens
  source 1..20: mol_type = genomic DNA
atgaaatgtaatggggtgcg

SEQ ID NO: 355 - DNA, 20 bp, Homo sapiens
  source 1..20: mol_type = genomic DNA
ttttggcagtgatgaccttg

SEQ ID NO: 356 - DNA, 20 bp, Homo sapiens
  source 1..20: mol_type = genomic DNA
ttcttggcttttctgaccct

SEQ ID NO: 357 - DNA, 21 bp, Homo sapiens
  source 1..21: mol_type = genomic DNA
ttgagaaagaccccaacagaa

SEQ ID NO: 358 - DNA, 22 bp, Homo sapiens
  source 1..22: mol_type = genomic DNA
gaaaataacacagtagggatgc

SEQ ID NO: 359 - DNA, 20 bp, Homo sapiens
  source 1..20: mol_type = genomic DNA
gaatggagaggcagttttca

SEQ ID NO: 360 - DNA, 20 bp, Homo sapiens
  source 1..20: mol_type = genomic DNA
cacccttttcctgttttgca

SEQ ID NO: 361 - DNA, 21 bp, Homo sapiens
  source 1..21: mol_type = genomic DNA
agaagaaacttgcagtgttgg

SEQ ID NO: 362 - DNA, 21 bp, Homo sapiens
  source 1..21: mol_type = genomic DNA
tgcagcattattctttctggg

SEQ ID NO: 363 - DNA, 21 bp, Homo sapiens
  source 1..21: mol_type = genomic DNA
acacacatattagggaacagc

SEQ ID NO: 364 - DNA, 20 bp, Homo sapiens
  source 1..20: mol_type = genomic DNA
gagtgtaggtgcttgggtat

SEQ ID NO: 365 - DNA, 20 bp, Homo sapiens
  source 1..20: mol_type = genomic DNA
ccttagaatcctagcgcctt

SEQ ID NO: 366 - DNA, 20 bp, Homo sapiens
  source 1..20: mol_type = genomic DNA
tcatgaggttgccagtgttt

SEQ ID NO: 367 - DNA, 20 bp, Homo sapiens
  source 1..20: mol_type = genomic DNA
ccccatacatcatcacatgc

SEQ ID NO: 368 - DNA, 20 bp, Homo sapiens
  source 1..20: mol_type = genomic DNA
gggtaatgctttcttgggga

SEQ ID NO: 369 - DNA, 20 bp, Homo sapiens
  source 1..20: mol_type = genomic DNA
agttgagaagggaaggcaag

SEQ ID NO: 370 - DNA, 21 bp, Homo sapiens
  source 1..21: mol_type = genomic DNA
ctcctggtggcttatttttga

SEQ ID NO: 371 - DNA, 22 bp, Homo sapiens
  source 1..22: mol_type = genomic DNA
tctggattttggctactcatga

SEQ ID NO: 372 - DNA, 20 bp, Homo sapiens
  source 1..20: mol_type = genomic DNA
gtagtcctcctttgcccttc

SEQ ID NO: 373 - DNA, 20 bp, Homo sapiens
  source 1..20: mol_type = genomic DNA
gacatgcacagatcgaaacc

SEQ ID NO: 374 - DNA, 20 bp, Homo sapiens
  source 1..20: mol_type = genomic DNA
cgcatttgacaacagggatc

SEQ ID NO: 375 - DNA, 20 bp, Homo sapiens
  source 1..20: mol_type = genomic DNA
aagccacctgttctctctca

SEQ ID NO: 376 - DNA, 20 bp, Homo sapiens
  source 1..20: mol_type = genomic DNA
attccaaccattccgacacc

SEQ ID NO: 377 - DNA, 20 bp, Homo sapiens
  source 1..20: mol_type = genomic DNA
aaagaaaatggtgaacgtgc

SEQ ID NO: 378 - DNA, 20 bp, Homo sapiens
  source 1..20: mol_type = genomic DNA
tgatcagggctttagaggtc

SEQ ID NO: 379 - DNA, 20 bp, Homo sapiens
  source 1..20: mol_type = genomic DNA
actccctattgttctcccct

SEQ ID NO: 380 - DNA, 20 bp, Homo sapiens
  source 1..20: mol_type = genomic DNA
ctccttgacagatgtgaccc

SEQ ID NO: 381 - DNA, 20 bp, Homo sapiens
  source 1..20: mol_type = genomic DNA
ttttggagtctgagccacaa

SEQ ID NO: 382 - DNA, 19 bp, Homo sapiens
  source 1..19: mol_type = genomic DNA
ttgaagtcccgttgctgat

SEQ ID NO: 383 - DNA, 20 bp, Homo sapiens
  source 1..20: mol_type = genomic DNA
ttggggtcagttctaacagt

SEQ ID NO: 384 - DNA, 20 bp, Homo sapiens
  source 1..20: mol_type = genomic DNA
ttttcaccacctcttccctc

SEQ ID NO: 385 - DNA, 20 bp, Homo sapiens
  source 1..20: mol_type = genomic DNA
acctgaccacaagctttaca

SEQ ID NO: 386 - DNA, 20 bp, Homo sapiens
  source 1..20: mol_type = genomic DNA
cacatattggcgcacagtac

SEQ ID NO: 387 - DNA, 20 bp, Homo sapiens
  source 1..20: mol_type = genomic DNA
gccatgcaccgatgaaaaat

SEQ ID NO: 388 - DNA, 20 bp, Homo sapiens
  source 1..20: mol_type = genomic DNA
ttgtgaggagatttctgggc

SEQ ID NO: 389 - DNA, 20 bp, Homo sapiens
  source 1..20: mol_type = genomic DNA
cacactaagagcactgggaa

SEQ ID NO: 390 - DNA, 20 bp, Homo sapiens
  source 1..20: mol_type = genomic DNA
atgacctagcacatcttccc

SEQ ID NO: 391 - DNA, 20 bp, Homo sapiens
  source 1..20: mol_type = genomic DNA
acattttccccattccatgc

SEQ ID NO: 392 - DNA, 20 bp, Homo sapiens
  source 1..20: mol_type = genomic DNA
gtctgtcaaccacactttgc

SEQ ID NO: 393 - DNA, 20 bp, Homo sapiens
  source 1..20: mol_type = genomic DNA
ctgtctctccttttgccaaa

SEQ ID NO: 394 - DNA, 20 bp, Homo sapiens
  source 1..20: mol_type = genomic DNA
agtaacctgcgactctcagt

SEQ ID NO: 395 - DNA, 20 bp, Homo sapiens
  source 1..20: mol_type = genomic DNA
tagcatttaaggagtgggct

SEQ ID NO: 396 - DNA, 20 bp, Homo sapiens
  source 1..20: mol_type = genomic DNA
ggcctcctcagtgatttgaa

SEQ ID NO: 397 - DNA, 20 bp, Homo sapiens
  source 1..20: mol_type = genomic DNA
ctttctttgcctcccctgta

SEQ ID NO: 398 - DNA, 20 bp, Homo sapiens
  source 1..20: mol_type = genomic DNA
acttccatttgtgtcaacgg

SEQ ID NO: 399 - DNA, 20 bp, Homo sapiens
  source 1..20: mol_type = genomic DNA
tcttgctttgggttagaggg

SEQ ID NO: 400 - DNA, 20 bp, Homo sapiens
  source 1..20: mol_type = genomic DNA
aaccacacctccacaagaaa

SEQ ID NO: 401 - DNA, 20 bp, Homo sapiens
  source 1..20: mol_type = genomic DNA
caagatatgagggaggggaa

SEQ ID NO: 402 - DNA, 20 bp, Homo sapiens
  source 1..20: mol_type = genomic DNA
tctaacctgggccctttctt

SEQ ID NO: 403 - DNA, 20 bp, Homo sapiens
  source 1..20: mol_type = genomic DNA
tgcccttccagaactgtaaa

SEQ ID NO: 404 - DNA, 20 bp, Homo sapiens
  source 1..20: mol_type = genomic DNA
gccaggtcacttaacaaagc

SEQ ID NO: 405 - DNA, 19 bp, Homo sapiens
  source 1..19: mol_type = genomic DNA
caataaggcgccaagttcg

SEQ ID NO: 406 - DNA, 20 bp, Homo sapiens
  source 1..20: mol_type = genomic DNA
gtcatcaggggagcaaatgt

SEQ ID NO: 407 - DNA, 21 bp, Homo sapiens
  source 1..21: mol_type = genomic DNA
aacatgcaatccctggaattc

SEQ ID NO: 408 - DNA, 21 bp, Homo sapiens
  source 1..21: mol_type = genomic DNA
agttgtttcaggacaggatct

SEQ ID NO: 409 - DNA, 21 bp, Homo sapiens
  source 1..21: mol_type = genomic DNA
tcctcctgcctttaataagct

SEQ ID NO: 410 - DNA, 21 bp, Homo sapiens
  source 1..21: mol_type = genomic DNA
ttacaaggcatctgacaggaa

SEQ ID NO: 411 - DNA, 21 bp, Homo sapiens
  source 1..21: mol_type = genomic DNA
ttactggtaggtttgagcaca

SEQ ID NO: 412 - DNA, 22 bp, Homo sapiens
  source 1..22: mol_type = genomic DNA
gagctacgttctttctcatcac

SEQ ID NO: 413 - DNA, 21 bp, Homo sapiens
  source 1..21: mol_type = genomic DNA
caccaattaaagtgtgctgca

SEQ ID NO: 414 - DNA, 21 bp, Homo sapiens
  source 1..21: mol_type = genomic DNA
tcccttccaaagtgccttata

SEQ ID NO: 415 - DNA, 21 bp, Homo sapiens
  source 1..21: mol_type = genomic DNA
tggttggtttgggatacttga

SEQ ID NO: 416 - DNA, 21 bp, Homo sapiens
  source 1..21: mol_type = genomic DNA
gaacccaaatcgatcatgcat

SEQ ID NO: 417 - DNA, 21 bp, Homo sapiens
  source 1..21: mol_type = genomic DNA
agagttaaacgtgcaatgtgg

SEQ ID NO: 418 - DNA, 22 bp, Homo sapiens
  source 1..22: mol_type = genomic DNA
gttcgttggtcatagttgttgt

SEQ ID NO: 419 - DNA, 21 bp, Homo sapiens
  source 1..21: mol_type = genomic DNA
agtttagccaaaggattcagc

SEQ ID NO: 420 - DNA, 22 bp, Homo sapiens
  source 1..22: mol_type = genomic DNA
tcaaccatttagaaccaccttg

SEQ ID NO: 421 - DNA, 21 bp, Homo sapiens
  source 1..21: mol_type = genomic DNA
aatgtccactttagcggagag

SEQ ID NO: 422 - DNA, 22 bp, Homo sapiens
  source 1..22: mol_type = genomic DNA
ggagtattctgttcatgttggg

SEQ ID NO: 423 - DNA, 22 bp, Homo sapiens
  source 1..22: mol_type = genomic DNA
tttctagaattgaggaagggca

SEQ ID NO: 424 - DNA, 21 bp, Homo sapiens
  source 1..21: mol_type = genomic DNA
aggataagacgaggcatcaat

SEQ ID NO: 425 - DNA, 22 bp, Homo sapiens
  source 1..22: mol_type = genomic DNA
ttctgtgttgacatgtacctct

SEQ ID NO: 426 - DNA, 21 bp, Homo sapiens
  source 1..21: mol_type = genomic DNA
tccaacatttctctctgtccc

SEQ ID NO: 427 - DNA, 20 bp, Homo sapiens
  source 1..20: mol_type = genomic DNA
ataacgtgtactcctcagcc

SEQ ID NO: 428 - DNA, 21 bp, Homo sapiens
  source 1..21: mol_type = genomic DNA
gcacttggaggatgtaaagac

SEQ ID NO: 429 - DNA, 21 bp, Homo sapiens
  source 1..21: mol_type = genomic DNA
tgtatgctttaggacccagtt

SEQ ID NO: 430 - DNA, 22 bp, Homo sapiens
  source 1..22: mol_type = genomic DNA
aactccacaggaatctttctga

SEQ ID NO: 431 - DNA, 20 bp, Homo sapiens
  source 1..20: mol_type = genomic DNA
catttctcctgggaccgaat

SEQ ID NO: 432 - DNA, 21 bp, Homo sapiens
  source 1..21: mol_type = genomic DNA
ttctgaagctgacgaaattcc

SEQ ID NO: 433 - DNA, 21 bp, Homo sapiens
  source 1..21: mol_type = genomic DNA
gttgcttagtccttgcttcac

SEQ ID NO: 434 - DNA, 21 bp, Homo sapiens
  source 1..21: mol_type = genomic DNA
aggtcattggtctgcagttat

SEQ ID NO: 435 - DNA, 21 bp, Homo sapiens
  source 1..21: mol_type = genomic DNA
agcatttagagaacagcagtc

SEQ ID NO: 436 - DNA, 21 bp, Homo sapiens
  source 1..21: mol_type = genomic DNA
gtgtaagaagtggttgggttt

SEQ ID NO: 437 - DNA, 22 bp, Homo sapiens
  source 1..22: mol_type = genomic DNA
aaaggcagagcagtgtatttag

SEQ ID NO: 438 - DNA, 22 bp, Homo sapiens
  source 1..22: mol_type = genomic DNA
agacaagagaacaatcaggtga

SEQ ID NO: 439 - DNA, 21 bp, Homo sapiens
  source 1..21: mol_type = genomic DNA
caaagaagctctaggacagga

SEQ ID NO: 440 - DNA, 21 bp, Homo sapiens
  source 1..21: mol_type = genomic DNA
tggtggaggaaatcaatgttg

SEQ ID NO: 441 - DNA, 20 bp, Homo sapiens
  source 1..20: mol_type = genomic DNA
cacaagggaggaaacgttct

SEQ ID NO: 442 - DNA, 21 bp, Homo sapiens
  source 1..21: mol_type = genomic DNA
tgagatttagtgccagctaga

SEQ ID NO: 443 - DNA, 21 bp, Homo sapiens
  source 1..21: mol_type = genomic DNA
aggattagtttggctcctcag

SEQ ID NO: 444 - DNA, 21 bp, Homo sapiens
  source 1..21: mol_type = genomic DNA
cctgcactatttcctcaaagc

SEQ ID NO: 445 - DNA, 21 bp, Homo sapiens
  source 1..21: mol_type = genomic DNA
caatttccttctcactgagcc

SEQ ID NO: 446 - DNA, 21 bp, Homo sapiens
  source 1..21: mol_type = genomic DNA
acgcttcccaaatctatctgg

SEQ ID NO: 447 - DNA, 22 bp, Homo sapiens
  source 1..22: mol_type = genomic DNA
cttatttgtgtgcccaatacca

SEQ ID NO: 448 - DNA, 21 bp, Homo sapiens
  source 1..21: mol_type = genomic DNA
ttgcagcaggaacaccataaa

SEQ ID NO: 449 - DNA, 21 bp, Homo sapiens
  source 1..21: mol_type = genomic DNA
ctgttcatgttgctaccacag

SEQ ID NO: 450 - DNA, 21 bp, Homo sapiens
  source 1..21: mol_type = genomic DNA
ctgccttagattcactttcgg

SEQ ID NO: 451 - DNA, 21 bp, Homo sapiens
  source 1..21: mol_type = genomic DNA
ccatctgtgaggtcttctttg

SEQ ID NO: 452 - DNA, 21 bp, Homo sapiens
  source 1..21: mol_type = genomic DNA
tccttggttgtgtatttagcc

SEQ ID NO: 453 - DNA, 20 bp, Homo sapiens
  source 1..20: mol_type = genomic DNA
agactcaactcacattggcc

SEQ ID NO: 454 - DNA, 20 bp, Homo sapiens
  source 1..20: mol_type = genomic DNA
ggtctgactctgtggtttgg

SEQ ID NO: 455 - DNA, 21 bp, Homo sapiens
  source 1..21: mol_type = genomic DNA
tttcatttcatcctgcccatg

SEQ ID NO: 456 - DNA, 21 bp, Homo sapiens
  source 1..21: mol_type = genomic DNA
ttctgttattcgccatcagtc

SEQ ID NO: 457 - DNA, 20 bp, Homo sapiens
  source 1..20: mol_type = genomic DNA
gaattgggaacttgggaagc

SEQ ID NO: 458 - DNA, 21 bp, Homo sapiens
  source 1..21: mol_type = genomic DNA
gaactttggagaggacagtgt

SEQ ID NO: 459 - DNA, 21 bp, Homo sapiens
  source 1..21: mol_type = genomic DNA
aactgtcatgtgtgtctgcta

SEQ ID NO: 460 - DNA, 21 bp, Homo sapiens
  source 1..21: mol_type = genomic DNA
tgattccttccacctaccaaa

SEQ ID NO: 461 - DNA, 21 bp, Homo sapiens
  source 1..21: mol_type = genomic DNA
gccaaggtccattatctcaag

SEQ ID NO: 462 - DNA, 21 bp, Homo sapiens
  source 1..21: mol_type = genomic DNA
gaacctgcattgtcattctct

SEQ ID NO: 463 - DNA, 22 bp, Homo sapiens
  source 1..22: mol_type = genomic DNA
aagaacatcaacaaactccagg

SEQ ID NO: 464 - DNA, 21 bp, Homo sapiens
  source 1..21: mol_type = genomic DNA
tcaattctctttcacacgtgc

SEQ ID NO: 465 - DNA, 21 bp, Homo sapiens
  source 1..21: mol_type = genomic DNA
aggtgctggatcttgaattca

SEQ ID NO: 466 - DNA, 21 bp, Homo sapiens
  source 1..21: mol_type = genomic DNA
tccctctacccgaatctctta

SEQ ID NO: 467 - DNA, 21 bp, Homo sapiens
  source 1..21: mol_type = genomic DNA
tgggtttaaaggacactagca

SEQ ID NO: 468 - DNA, 21 bp, Homo sapiens
  source 1..21: mol_type = genomic DNA
cgaaggtcacacagtttagtc

SEQ ID NO: 469 - DNA, 21 bp, Homo sapiens
  source 1..21: mol_type = genomic DNA
atgtgccttgttgattgatgg

SEQ ID NO: 470 - DNA, 21 bp, Homo sapiens
  source 1..21: mol_type = genomic DNA
agatggtatgtcacaaagcac

SEQ ID NO: 471 - DNA, 21 bp, Homo sapiens
  source 1..21: mol_type = genomic DNA
acactttggagagcttcagat

SEQ ID NO: 472 - DNA, 22 bp, Homo sapiens
  source 1..22: mol_type = genomic DNA
gtgcccagaattatttgtgtct

SEQ ID NO: 473 - DNA, 21 bp, Homo sapiens
  source 1..21: mol_type = genomic DNA
gctctcttgtggaaacgatta

SEQ ID NO: 474 - DNA, 21 bp, Homo sapiens
  source 1..21: mol_type = genomic DNA
agtttgtttctctggcctact

SEQ ID NO: 475 - DNA, 21 bp, Homo sapiens
  source 1..21: mol_type = genomic DNA
accacctcaaagatttcatgg

SEQ ID NO: 476 - DNA, 22 bp, Homo sapiens
  source 1..22: mol_type = genomic DNA
gtcttcatctatttcgtgagcc

SEQ ID NO: 477 - DNA, 21 bp, Homo sapiens
  source 1..21: mol_type = genomic DNA
tcatcccagattcagaatgcc

SEQ ID NO: 478 - DNA, 21 bp, Homo sapiens
  source 1..21: mol_type = genomic DNA
cgttcaatgaagtcccttgtc

SEQ ID NO: 479 - DNA, 21 bp, Homo sapiens
  source 1..21: mol_type = genomic DNA
ttcacaagaactctgctggat

SEQ ID NO: 480 - DNA, 21 bp, Homo sapiens
  source 1..21: mol_type = genomic DNA
gaagccttctagtgggactaa

SEQ ID NO: 481 - DNA, 21 bp, Homo sapiens
  source 1..21: mol_type = genomic DNA
gttagggtcatgggtcacttt

SEQ ID NO: 482 - DNA, 21 bp, Homo sapiens
  source 1..21: mol_type = genomic DNA
gcctttgtagagtggacttct

SEQ ID NO: 483 - DNA, 21 bp, Homo sapiens
  source 1..21: mol_type = genomic DNA
ggcttcttgatactgctttcc

SEQ ID NO: 484 - DNA, 21 bp, Homo sapiens
  source 1..21: mol_type = genomic DNA
aggtgtgcaatactcaaggaa

SEQ ID NO: 485 - DNA, 21 bp, Homo sapiens
  source 1..21: mol_type = genomic DNA
aaggtcttaggagtgaggaca

SEQ ID NO: 486 - DNA, 22 bp, Homo sapiens
  source 1..22: mol_type = genomic DNA
tcgtgctatttcagtcagatct

SEQ ID NO: 487 - DNA, 21 bp, Homo sapiens
  source 1..21: mol_type = genomic DNA
tgtccagccgtaacatttcat

SEQ ID NO: 488 - DNA, 21 bp, Homo sapiens
  source 1..21: mol_type = genomic DNA
aatggacatctttcaggtctg

SEQ ID NO: 489 - DNA, 21 bp, Homo sapiens
  source 1..21: mol_type = genomic DNA
tcaaattgggatcgcattagg

SEQ ID NO: 490 - DNA, 22 bp, Homo sapiens
  source 1..22: mol_type = genomic DNA
atgcctgggtttattcatcttg

SEQ ID NO: 491 - DNA, 21 bp, Homo sapiens
  source 1..21: mol_type = genomic DNA
ggagaagtttgggtttgatcc

SEQ ID NO: 492 - DNA, 21 bp, Homo sapiens
  source 1..21: mol_type = genomic DNA
tgataggagccatcagttctt

SEQ ID NO: 493 - DNA, 21 bp, Homo sapiens
  source 1..21: mol_type = genomic DNA
agcagatgttgttagctttcc

SEQ ID NO: 494 - DNA, 21 bp, Homo sapiens
  source 1..21: mol_type = genomic DNA
ttctctgtcacttccatgagg

SEQ ID NO: 495 - DNA, 22 bp, Homo sapiens
  source 1..22: mol_type = genomic DNA
ccagtaacttattctgccagag

SEQ ID NO: 496 - DNA, 21 bp, Homo sapiens
  source 1..21: mol_type = genomic DNA
tgagagacaagctgcattaca

SEQ ID NO: 497 - DNA, 22 bp, Homo sapiens
  source 1..22: mol_type = genomic DNA
gcacagaaattacagttcatgg

SEQ ID NO: 498 - DNA, 21 bp, Homo sapiens
  source 1..21: mol_type = genomic DNA
gctctcgtatctgacagtgaa

SEQ ID NO: 499 - DNA, 21 bp, Homo sapiens
  source 1..21: mol_type = genomic DNA
caggcatcttggtttgtagtg

SEQ ID NO: 500 - DNA, 21 bp, Homo sapiens
  source 1..21: mol_type = genomic DNA
cgtgatgaacagtgatgactt

SEQ ID NO: 501 - DNA, 21 bp, Homo sapiens
  source 1..21: mol_type = genomic DNA
cgccatttgttctcctattca

SEQ ID NO: 502 - DNA, 21 bp, Homo sapiens
  source 1..21: mol_type = genomic DNA
ttcgttagctactgggtactc

SEQ ID NO: 503 - DNA, 21 bp, Homo sapiens
  source 1..21: mol_type = genomic DNA
ccaccctttacacctatccaa

SEQ ID NO: 504 - DNA, 21 bp, Homo sapiens
  source 1..21: mol_type = genomic DNA
agagtgcacaaaggagaagac

SEQ ID NO: 505 - DNA, 22 bp, Homo sapiens
  source 1..22: mol_type = genomic DNA
tctactgtgtcaaagcagattg

SEQ ID NO: 506 - DNA, 21 bp, Homo sapiens
  source 1..21: mol_type = genomic DNA
ttcttcctagccttcctttcc

SEQ ID NO: 507 - DNA, 21 bp, Homo sapiens
  source 1..21: mol_type = genomic DNA
tctctggctgtgcagtaaatt

SEQ ID NO: 508 - DNA, 21 bp, Homo sapiens
  source 1..21: mol_type = genomic DNA
aaactcccagctttaatccct

SEQ ID NO: 509 - DNA, 21 bp, Homo sapiens
  source 1..21: mol_type = genomic DNA
aagaatgggtgagttgggttc

SEQ ID NO: 510 - DNA, 21 bp, Homo sapiens
  source 1..21: mol_type = genomic DNA
ggaaactgaattgccaagtct

SEQ ID NO: 511 - DNA, 20 bp, Homo sapiens
  source 1..20: mol_type = genomic DNA
ctcccaacttttatgcagcc

SEQ ID NO: 512 - DNA, 21 bp, Homo sapiens
  source 1..21: mol_type = genomic DNA
gctcagggaatatcttgggaa

SEQ ID NO: 513 - DNA, 21 bp, Homo sapiens
  source 1..21: mol_type = genomic DNA
acattcagcaagtaggaagga

SEQ ID NO: 514 - DNA, 20 bp, Homo sapiens
  source 1..20: mol_type = genomic DNA
cccagaagagcagtaacaac

SEQ ID NO: 515 - DNA, 20 bp, Homo sapiens
  source 1..20: mol_type = genomic DNA
gaaaaagggggataggcatt

SEQ ID NO: 516 - DNA, 21 bp, Homo sapiens
  source 1..21: mol_type = genomic DNA
cccaacaactgcaataaaagg

SEQ ID NO: 517 - DNA, 20 bp, Homo sapiens
  source 1..20: mol_type = genomic DNA
accgaaattgcttgctctta

SEQ ID NO: 518 - DNA, 20 bp, Homo sapiens
  source 1..20: mol_type = genomic DNA
ccttagtgtgacaggacagg

SEQ ID NO: 519 - DNA, 20 bp, Homo sapiens
  source 1..20: mol_type = genomic DNA
ccaagacaactaggccaatg

SEQ ID NO: 520 - DNA, 21 bp, Homo sapiens
  source 1..21: mol_type = genomic DNA
gaagagatgatgcaaaagagc

SEQ ID NO: 521 - DNA, 20 bp, Homo sapiens
  source 1..20: mol_type = genomic DNA
tccaagcaagggatctcttc

SEQ ID NO: 522 - DNA, 20 bp, Homo sapiens
  source 1..20: mol_type = genomic DNA
gaatggtcagggaagggttt

SEQ ID NO: 523 - DNA, 20 bp, Homo sapiens
  source 1..20: mol_type = genomic DNA
agtcttcagccatcttcctg

SEQ ID NO: 524 - DNA, 21 bp, Homo sapiens
  source 1..21: mol_type = genomic DNA
gcatttccaggctttacaagt

SEQ ID NO: 525 - DNA, 20 bp, Homo sapiens
  source 1..20: mol_type = genomic DNA
ctctctctccctggtcagat

SEQ ID NO: 526 - DNA, 20 bp, Homo sapiens
  source 1..20: mol_type = genomic DNA
cagcaattctcaggctcaga

SEQ ID NO: 527 - DNA, 21 bp, Homo sapiens
  source 1..21: mol_type = genomic DNA
tctgaaacaaagcctccttag

SEQ ID NO: 528 - DNA, 21 bp, Homo sapiens
  source 1..21: mol_type = genomic DNA
aggataaggtttcccatgctc

SEQ ID NO: 529 - DNA, 21 bp, Homo sapiens
  source 1..21: mol_type = genomic DNA
atgtatctgaaggagctctgc

SEQ ID NO: 530 - DNA, 20 bp, Homo sapiens
  source 1..20: mol_type = genomic DNA
ggccttcatcacaaacaaca

SEQ ID NO: 531 - DNA, 20 bp, Homo sapiens
  source 1..20: mol_type = genomic DNA
tgtgtcccatctacaaagcc

SEQ ID NO: 532 - DNA, 20 bp, Homo sapiens
  source 1..20: mol_type = genomic DNA
tccttgaactctttccaagc

SEQ ID NO: 533 - DNA, 20 bp, Homo sapiens
  source 1..20: mol_type = genomic DNA
tgttttcctgtccaagtcca

SEQ ID NO: 534 - DNA, 19 bp, Homo sapiens
  source 1..19: mol_type = genomic DNA
cagcatccatcgctcgaaa

SEQ ID NO: 535 - DNA, 20 bp, Homo sapiens
  source 1..20: mol_type = genomic DNA
ggtattggtgggggaaatga

SEQ ID NO: 536 - DNA, 24 bp, Homo sapiens
  source 1..24: mol_type = genomic DNA
gcactgctgtaaaagatctatgag

SEQ ID NO: 537 - DNA, 19 bp, Homo sapiens
  source 1..19: mol_type = genomic DNA
actcaaaggcacatttcgc

SEQ ID NO: 538 - DNA, 22 bp, Homo sapiens
  source 1..22: mol_type = genomic DNA
attctattccgatcacagcctt

SEQ ID NO: 539 - DNA, 20 bp, Homo sapiens
  source 1..20: mol_type = genomic DNA
ctacctgacaaatggagctt

SEQ ID NO: 540 - DNA, 21 bp, Homo sapiens
  source 1..21: mol_type = genomic DNA
gaaatggccatgtgtactgag

SEQ ID NO: 541 - DNA, 20 bp, Homo sapiens
  source 1..20: mol_type = genomic DNA
gaagcctctcaagctacaag

SEQ ID NO: 542 - DNA, 22 bp, Homo sapiens
  source 1..22: mol_type = genomic DNA
gaatgagattagggagcaaagt

SEQ ID NO: 543 - DNA, 20 bp, Homo sapiens
  source 1..20: mol_type = genomic DNA
ggaagtaagaagagtgctgc

SEQ ID NO: 544 - DNA, 20 bp, Homo sapiens
  source 1..20: mol_type = genomic DNA
gctcctgattgaagaagtgt

SEQ ID NO: 545 - DNA, 19 bp, Homo sapiens
  source 1..19: mol_type = genomic DNA
ctgctcctttgtctcctgt

SEQ ID NO: 546 - DNA, 21 bp, Homo sapiens
  source 1..21: mol_type = genomic DNA
taaggtgagagtgtgaggaag

SEQ ID NO: 547 - DNA, 21 bp, Homo sapiens
  source 1..21: mol_type = genomic DNA
ccaggggaacatttactcaga

SEQ ID NO: 548 - DNA, 20 bp, Homo sapiens
  source 1..20: mol_type = genomic DNA
agggtacatgtaaggcagct

SEQ ID NO: 549 - DNA, 20 bp, Homo sapiens
  source 1..20: mol_type = genomic DNA
ttctgtggcattgtgtcttg

SEQ ID NO: 550 - DNA, 20 bp, Homo sapiens
  source 1..20: mol_type = genomic DNA
ccccaaatttaccccactct

SEQ ID NO: 551 - DNA, 20 bp, Homo sapiens
  source 1..20: mol_type = genomic DNA
atccctagcactttcaggac

SEQ ID NO: 552 - DNA, 20 bp, Homo sapiens
  source 1..20: mol_type = genomic DNA
ttaccaatccatccagcctg

SEQ ID NO: 553 - DNA, 20 bp, Homo sapiens
  source 1..20: mol_type = genomic DNA
agaagctaaacaggttgccc

SEQ ID NO: 554 - DNA, 20 bp, Homo sapiens
  source 1..20: mol_type = genomic DNA
cataagagcacagccaagat

SEQ ID NO: 555 - DNA, 20 bp, Homo sapiens
  source 1..20: mol_type = genomic DNA
tgtcctgccacttttacatc

SEQ ID NO: 556 - DNA, 21 bp, Homo sapiens
  source 1..21: mol_type = genomic DNA
gagctaagcagaacctaagga

SEQ ID NO: 557 - DNA, 21 bp, Homo sapiens
  source 1..21: mol_type = genomic DNA
ttaagcaacaggaacctaccc

SEQ ID NO: 558 - DNA, 21 bp, Homo sapiens
  source 1..21: mol_type = genomic DNA
gccaagggtaatcatagcaac

SEQ ID NO: 559 - DNA, 21 bp, Homo sapiens
  source 1..21: mol_type = genomic DNA
tcataatgaaacccttgctgc

SEQ ID NO: 560 - DNA, 21 bp, Homo sapiens
  source 1..21: mol_type = genomic DNA
aatcctagtgcatgagactcc

SEQ ID NO: 561 - DNA, 21 bp, Homo sapiens
  source 1..21: mol_type = genomic DNA
tactgcctgcatcattaccac

SEQ ID NO: 562 - DNA, 21 bp, Homo sapiens
  source 1..21: mol_type = genomic DNA
attaacaatgaggagccaggt

SEQ ID NO: 563 - DNA, 21 bp, Homo sapiens
  source 1..21: mol_type = genomic DNA
gagagatggttgagaaatgcc

SEQ ID NO: 564 - DNA, 21 bp, Homo sapiens
  source 1..21: mol_type = genomic DNA
actacaaccaccaattacagc

SEQ ID NO: 565 - DNA, 21 bp, Homo sapiens
  source 1..21: mol_type = genomic DNA
agtgacatttccaagggcttt

SEQ ID NO: 566 - DNA, 21 bp, Homo sapiens
  source 1..21: mol_type = genomic DNA
ggagatgggaagacgattaga

SEQ ID NO: 567 - DNA, 22 bp, Homo sapiens
  source 1..22: mol_type = genomic DNA
agtctttcagtcttacatgggt

SEQ ID NO: 568 - DNA, 21 bp, Homo sapiens
  source 1..21: mol_type = genomic DNA
tagtttctgtgatcctggcag

SEQ ID NO: 569 - DNA, 20 bp, Homo sapiens
  source 1..20: mol_type = genomic DNA
tttctcccagctgttcctag

SEQ ID NO: 570 - DNA, 21 bp, Homo sapiens
  source 1..21: mol_type = genomic DNA
tacggaacttcgaatcaactc

SEQ ID NO: 571 - DNA, 21 bp, Homo sapiens
  source 1..21: mol_type = genomic DNA
tcaagtcaccctcattgtagg

SEQ ID NO: 572 - DNA, 21 bp, Homo sapiens
  source 1..21: mol_type = genomic DNA
tgtaacgtggatgtgagattg

SEQ ID NO: 573 - DNA, 21 bp, Homo sapiens
  source 1..21: mol_type = genomic DNA
ttgagctaagtctgcatcact

SEQ ID NO: 574 - DNA, 21 bp, Homo sapiens
  source 1..21: mol_type = genomic DNA
ctagagaaagcaacgcctaag

SEQ ID NO: 575 - DNA, 21 bp, Homo sapiens
  source 1..21: mol_type = genomic DNA
agcaccttccatagcttcttt

SEQ ID NO: 576 - DNA, 21 bp, Homo sapiens
  source 1..21: mol_type = genomic DNA
gtgtcttctgatggccaaatg

SEQ ID NO: 577 - DNA, 21 bp, Homo sapiens
  source 1..21: mol_type = genomic DNA
aatcaggtgaaaggtacctcc

SEQ ID NO: 578 - DNA, 21 bp, Homo sapiens
  source 1..21: mol_type = genomic DNA
ccttcacaattcagggaacaa

SEQ ID NO: 579 - DNA, 21 bp, Homo sapiens
  source 1..21: mol_type = genomic DNA
tggacccagttctatgcaatt

SEQ ID NO: 580 - DNA, 21 bp, Homo sapiens
  source 1..21: mol_type = genomic DNA
aatgacccttacaactccgaa

SEQ ID NO: 581 - DNA, 21 bp, Homo sapiens
  source 1..21: mol_type = genomic DNA
tttgggaagtgattgtgaagg

SEQ ID NO: 582 - DNA, 21 bp, Homo sapiens
  source 1..21: mol_type = genomic DNA
tcagctgcatagaccttgttt

SEQ ID NO: 583 - DNA, 21 bp, Homo sapiens
  source 1..21: mol_type = genomic DNA
tcatttgttctcattacgggc

SEQ ID NO: 584 - DNA, 20 bp, Homo sapiens
  source 1..20: mol_type = genomic DNA
ttctacctgggttctcttgg

SEQ ID NO: 585 - DNA, 21 bp, Homo sapiens
  source 1..21: mol_type = genomic DNA
taacttcctgagcacacatca

SEQ ID NO: 586 - DNA, 21 bp, Homo sapiens
  source 1..21: mol_type = genomic DNA
gggtaaattcaggaatgcaca

SEQ ID NO: 587 - DNA, 21 bp, Homo sapiens
  source 1..21: mol_type = genomic DNA
atttcttctggtgagtttgcg

SEQ ID NO: 588 - DNA, 21 bp, Homo sapiens
  source 1..21: mol_type = genomic DNA
cctcttcctgacatgttgttg

SEQ ID NO: 589 - DNA, 21 bp, Homo sapiens
  source 1..21: mol_type = genomic DNA
gttggtgccagattgtaactt

SEQ ID NO: 590 - DNA, 21 bp, Homo sapiens
  source 1..21: mol_type = genomic DNA
gcctggctcaataatagtcct

SEQ ID NO: 591 - DNA, 21 bp, Homo sapiens
  source 1..21: mol_type = genomic DNA
atgttgccttctctacgtttg

SEQ ID NO: 592 - DNA, 20 bp, Homo sapiens
  source 1..20: mol_type = genomic DNA
gagtggagcgctacctttat

SEQ ID NO: 593 - DNA, 20 bp, Homo sapiens
  source 1..20: mol_type = genomic DNA
agaatgggaaatgggaagga

SEQ ID NO: 594 - DNA, 20 bp, Homo sapiens
  source 1..20: mol_type = genomic DNA
cacaatacatgggctgcttt

SEQ ID NO: 595 - DNA, 21 bp, Homo sapiens
  source 1..21: mol_type = genomic DNA
ccactccaactctgcttttac

SEQ ID NO: 596 - DNA, 21 bp, Homo sapiens
  source 1..21: mol_type = genomic DNA
gatgtggattgtctttgttgc

SEQ ID NO: 597 - DNA, 22 bp, Homo sapiens
  source 1..22: mol_type = genomic DNA
agcctttcattgcacatttcag

SEQ ID NO: 598 - DNA, 20 bp, Homo sapiens
  source 1..20: mol_type = genomic DNA
tcccaccacaagaccaattt

SEQ ID NO: 599 - DNA, 21 bp, Homo sapiens
  source 1..21: mol_type = genomic DNA
gaagataggtggtggagttca

SEQ ID NO: 600 - DNA, 21 bp, Homo sapiens
  source 1..21: mol_type = genomic DNA
ctgtttgaatgaagttggctg

SEQ ID NO: 601 - DNA, 21 bp, Homo sapiens
  source 1..21: mol_type = genomic DNA
tatacatgggtgggatttgtc

SEQ ID NO: 602 - DNA, 21 bp, Homo sapiens
  source 1..21: mol_type = genomic DNA
tttgtgatggaccatctaacc

SEQ ID NO: 603 - DNA, 20 bp, Homo sapiens
  source 1..20: mol_type = genomic DNA
gaagatctggtgtcccacta

SEQ ID NO: 604 - DNA, 20 bp, Homo sapiens
  source 1..20: mol_type = genomic DNA
atctgaagatctccgtggta

SEQ ID NO: 605 - DNA, 21 bp, Homo sapiens
  source 1..21: mol_type = genomic DNA
atgtatgaaccatttcctgct

SEQ ID NO: 606 - DNA, 22 bp, Homo sapiens
  source 1..22: mol_type = genomic DNA
agcacagaattgaatgaaggaa

SEQ ID NO: 607 - DNA, 20 bp, Homo sapiens
  source 1..20: mol_type = genomic DNA
gcatgagtaaggctgaagtg

SEQ ID NO: 608 - DNA, 24 bp, Homo sapiens
  source 1..24: mol_type = genomic DNA
aaaggcttatattgcttttgaatc

SEQ ID NO: 609 - DNA, 20 bp, Homo sapiens
  source 1..20: mol_type = genomic DNA
ttgctgttgttgggatcaag

SEQ ID NO: 610 - DNA, 20 bp, Homo sapiens
  source 1..20: mol_type = genomic DNA
gcttctgcatccacctatct

SEQ ID NO: 611 - DNA, 20 bp, Homo sapiens
  source 1..20: mol_type = genomic DNA
aaaagctgcctaaaatgcca

SEQ ID NO: 612 - DNA, 20 bp, Homo sapiens
  source 1..20: mol_type = genomic DNA
agtcagcaagttagcagaaa

SEQ ID NO: 613 - DNA, 20 bp, Homo sapiens
  source 1..20: mol_type = genomic DNA
cccacatttatcccttgtcc

SEQ ID NO: 614 - DNA, 20 bp, Homo sapiens
  source 1..20: mol_type = genomic DNA
tgtctgattccatctttccc

SEQ ID NO: 615 - DNA, 19 bp, Homo sapiens
  source 1..19: mol_type = genomic DNA
cagccaccaaaacacaatg

SEQ ID NO: 616 - DNA, 20 bp, Homo sapiens
  source 1..20: mol_type = genomic DNA
aaggcctgttttgtgtgtag

SEQ ID NO: 617 - DNA, 21 bp, Homo sapiens
  source 1..21: mol_type = genomic DNA
acagctcacagatctttaagc

SEQ ID NO: 618 - DNA, 23 bp, Homo sapiens
  source 1..23: mol_type = genomic DNA
ggcattataaagagatagctcca

SEQ ID NO: 619 - DNA, 20 bp, Homo sapiens
  source 1..20: mol_type = genomic DNA
tgtttttccttgccctgtaa

SEQ ID NO: 620 - DNA, 20 bp, Homo sapiens
  source 1..20: mol_type = genomic DNA
taaccagatgaatgagggca

SEQ ID NO: 621 - DNA, 20 bp, Homo sapiens
  source 1..20: mol_type = genomic DNA
caacaagccaaaaccacatc

SEQ ID NO: 622 - DNA, 20 bp, Homo sapiens
  source 1..20: mol_type = genomic DNA
gttggttcttgaagacctga

SEQ ID NO: 623 - DNA, 22 bp, Homo sapiens
  source 1..22: mol_type = genomic DNA
tgtggtaagtagtctctaaaga

SEQ ID NO: 624 - DNA, 20 bp, Homo sapiens
  source 1..20: mol_type = genomic DNA
accaaatttccagatcacgg

SEQ ID NO: 625 - DNA, 20 bp, Homo sapiens
  source 1..20: mol_type = genomic DNA
aatgaatggtcatggctcac

SEQ ID NO: 626 - DNA, 20 bp, Homo sapiens
  source 1..20: mol_type = genomic DNA
gccctgaagcacattaaagt

SEQ ID NO: 627 - DNA, 20 bp, Homo sapiens
  source 1..20: mol_type = genomic DNA
gcctccaggtttatgacaac

SEQ ID NO: 628 - DNA, 20 bp, Homo sapiens
  source 1..20: mol_type = genomic DNA
cagctctattccccttctga

SEQ ID NO: 629 - DNA, 20 bp, Homo sapiens
  source 1..20: mol_type = genomic DNA
ccttggaagggaaagttgat

SEQ ID NO: 630 - DNA, 18 bp, Homo sapiens
  source 1..18: mol_type = genomic DNA
gtcccaccctgctcttag

SEQ ID NO: 631 - DNA, 20 bp, Homo sapiens
  source 1..20: mol_type = genomic DNA
cagagtaagacagtgggaca

SEQ ID NO: 632 - DNA, 20 bp, Homo sapiens
  source 1..20: mol_type = genomic DNA
aagtgtggtgcataaaggat

SEQ ID NO: 633 - DNA, 20 bp, Homo sapiens
  source 1..20: mol_type = genomic DNA
ctgtaagaaggagggtttgg

SEQ ID NO: 634 - DNA, 20 bp, Homo sapiens
  source 1..20: mol_type = genomic DNA
gaggttgatgagaggtaggg

SEQ ID NO: 635 - DNA, 20 bp, Homo sapiens
  source 1..20: mol_type = genomic DNA
agccagggatattgttgaag

SEQ ID NO: 636 - DNA, 20 bp, Homo sapiens
  source 1..20: mol_type = genomic DNA
caggtaagtgtgtgttccag

SEQ ID NO: 637 - DNA, 20 bp, Homo sapiens
  source 1..20: mol_type = genomic DNA
ttgatttccatgcagaaggg

SEQ ID NO: 638 - DNA, 20 bp, Homo sapiens
  source 1..20: mol_type = genomic DNA
taatttggccttaggggttg

SEQ ID NO: 639 - DNA, 21 bp, Homo sapiens
  source 1..21: mol_type = genomic DNA
tccataaaaggtgcttaaagc

SEQ ID NO: 640 - DNA, 20 bp, Homo sapiens
  source 1..20: mol_type = genomic DNA
ttgtatcacaccatcgtgga

SEQ ID NO: 641 - DNA, 20 bp, Homo sapiens
  source 1..20: mol_type = genomic DNA
actgctgagaacaatcatgc

SEQ ID NO: 642 - DNA, 20 bp, Homo sapiens
  source 1..20: mol_type = genomic DNA
ggtgtggagaatttgtttgc

SEQ ID NO: 643 - DNA, 20 bp, Homo sapiens
  source 1..20: mol_type = genomic DNA
tgatattaggcggtggctta

SEQ ID NO: 644 - DNA, 20 bp, Homo sapiens
  source 1..20: mol_type = genomic DNA
tctcacctaaaatctggggc

SEQ ID NO: 645 - DNA, 22 bp, Homo sapiens
  source 1..22: mol_type = genomic DNA
aggactgtgacactttatcttt

SEQ ID NO: 646 - DNA, 21 bp, Homo sapiens
  source 1..21: mol_type = genomic DNA
atgcgaggtagaaaatgagag

SEQ ID NO: 647 - DNA, 21 bp, Homo sapiens
  source 1..21: mol_type = genomic DNA
tgtggctttaaggttctgaag

SEQ ID NO: 648 - DNA, 20 bp, Homo sapiens
  source 1..20: mol_type = genomic DNA
tcgttgctattctgctttga

SEQ ID NO: 649 - DNA, 20 bp, Homo sapiens
  source 1..20: mol_type = genomic DNA
tcccttttgtggtttcttgg

SEQ ID NO: 650 - DNA, 20 bp, Homo sapiens
  source 1..20: mol_type = genomic DNA
ttgccgcactcttcattaat

SEQ ID NO: 651 - DNA, 20 bp, Homo sapiens
  source 1..20: mol_type = genomic DNA
actggcttctcctcattagt

SEQ ID NO: 652 - DNA, 20 bp, Homo sapiens
  source 1..20: mol_type = genomic DNA
actgatttgccatgtagagc

SEQ ID NO: 653 - DNA, 20 bp, Homo sapiens
  source 1..20: mol_type = genomic DNA
gaatgtcatattgcctgcca

SEQ ID NO: 654 - DNA, 20 bp, Homo sapiens
  source 1..20: mol_type = genomic DNA
tcactcgcttagaatgttgc

SEQ ID NO: 655 - DNA, 21 bp, Homo sapiens
  source 1..21: mol_type = genomic DNA
accattaacttcctgcaaact

SEQ ID NO: 656 - DNA, 20 bp, Homo sapiens
  source 1..20: mol_type = genomic DNA
taaagccccataccaggatt

SEQ ID NO: 657 - DNA, 20 bp, Homo sapiens
  source 1..20: mol_type = genomic DNA
ccaaaaatcacccatatgcg

SEQ ID NO: 658 - DNA, 20 bp, Homo sapiens
  source 1..20: mol_type = genomic DNA
ataacccaggtgcttcaaag

SEQ ID NO: 659 - DNA, 19 bp, Homo sapiens
  source 1..19: mol_type = genomic DNA
tccacagcagaagtaacga

SEQ ID NO: 660 - DNA, 21 bp, Homo sapiens
  source 1..21: mol_type = genomic DNA
aggaaagctatgaagaaaggg

SEQ ID NO: 661 - DNA, 20 bp, Homo sapiens
  source 1..20: mol_type = genomic DNA
agctccagagtgtcagtatt

SEQ ID NO: 662 - DNA, 22 bp, Homo sapiens
  source 1..22: mol_type = genomic DNA
ttgatttccagcactgaacttt

SEQ ID NO: 663 - DNA, 20 bp, Homo sapiens
  source 1..20: mol_type = genomic DNA
tgtttgatttttcaggctga

SEQ ID NO: 664 - DNA, 20 bp, Homo sapiens
  source 1..20: mol_type = genomic DNA
ctggtcattcctgagtgtct

SEQ ID NO: 665 - DNA, 24 bp, Homo sapiens
  source 1..24: mol_type = genomic DNA
tcctgttttacacttttctaactt

SEQ ID NO: 666 - DNA, 20 bp, Homo sapiens
  source 1..20: mol_type = genomic DNA
acctcaacctgttttagcac

SEQ ID NO: 667 - DNA, 20 bp, Homo sapiens
  source 1..20: mol_type = genomic DNA
cagtgtgtgtcatgccaaat

SEQ ID NO: 668 - DNA, 21 bp, Homo sapiens
  source 1..21: mol_type = genomic DNA
ggtctatgttaatcttgggcc

SEQ ID NO: 669 - DNA, 21 bp, Homo sapiens
  source 1..21: mol_type = genomic DNA
agccagtctgtatctaaaggt

SEQ ID NO: 670 - DNA, 20 bp, Homo sapiens
  source 1..20: mol_type = genomic DNA
actcttggggtttcttcagt

SEQ ID NO: 671 - DNA, 21 bp, Homo sapiens
  source 1..21: mol_type = genomic DNA
cgaaccaaaagcaaaatcctt

SEQ ID NO: 672 - DNA, 20 bp, Homo sapiens
  source 1..20: mol_type = genomic DNA
aatctatggaggtcactggg

SEQ ID NO: 673 - DNA, 20 bp, Homo sapiens
  source 1..20: mol_type = genomic DNA
aggtccttgtagtttgcttg

SEQ ID NO: 674 - DNA, 20 bp, Homo sapiens
  source 1..20: mol_type = genomic DNA
gtgagagccaatagagtgtg

SEQ ID NO: 675 - DNA, 20 bp, Homo sapiens
  source 1..20: mol_type = genomic DNA
gcatggtgtgtgaaagtgat

SEQ ID NO: 676 - DNA, 20 bp, Homo sapiens
  source 1..20: mol_type = genomic DNA
atgctgcttttgactgatgt

SEQ ID NO: 677 - DNA, 20 bp, Homo sapiens
  source 1..20: mol_type = genomic DNA
cgaagctgtattcctgtctc

SEQ ID NO: 678 - DNA, 19 bp, Homo sapiens
  source 1..19: mol_type = genomic DNA
atggactaactggagagcg

SEQ ID NO: 679 - DNA, 20 bp, Homo sapiens
  source 1..20: mol_type = genomic DNA
atgtcctgccagtaaacaca

SEQ ID NO: 680 - DNA, 20 bp, Homo sapiens
  source 1..20: mol_type = genomic DNA
tgccactaaacacctaagga

SEQ ID NO: 681 - DNA, 20 bp, Homo sapiens
  source 1..20: mol_type = genomic DNA
ttggaaattttggggtcagg

SEQ ID NO: 682 - DNA, 20 bp, Homo sapiens
  source 1..20: mol_type = genomic DNA
ttctgacctcccttactgag

SEQ ID NO: 683 - DNA, 19 bp, Homo sapiens
  source 1..19: mol_type = genomic DNA
tatgtgcttgcgatgtgtt

SEQ ID NO: 684 - DNA, 20 bp, Homo sapiens
  source 1..20: mol_type = genomic DNA
gaaccttagggccagtctat

SEQ ID NO: 685 - DNA, 21 bp, Homo sapiens
  source 1..21: mol_type = genomic DNA
agaacctgatgtgttttcctc

SEQ ID NO: 686 - DNA, 20 bp, Homo sapiens
  source 1..20: mol_type = genomic DNA
atgtgagagaagcaaaaccc

SEQ ID NO: 687 - DNA, 20 bp, Homo sapiens
  source 1..20: mol_type = genomic DNA
gtagttgtcttgagggcttt

SEQ ID NO: 688 - DNA, 20 bp, Homo sapiens
  source 1..20: mol_type = genomic DNA
cctggtcaacaacatatggg

SEQ ID NO: 689 - DNA, 21 bp, Homo sapiens
  source 1..21: mol_type = genomic DNA
agaatattgcatttggccaga

SEQ ID NO: 690 - DNA, 21 bp, Homo sapiens
  source 1..21: mol_type = genomic DNA
aaagctatgcaaatagtggca

SEQ ID NO: 691 - DNA, 20 bp, Homo sapiens
  source 1..20: mol_type = genomic DNA
agttcccaacagaggctaat

SEQ ID NO: 692 - DNA, 20 bp, Homo sapiens
  source 1..20: mol_type = genomic DNA
agttataggtgaggaagggc

SEQ ID NO: 693 - DNA, 20 bp, Homo sapiens
  source 1..20: mol_type = genomic DNA
cactgcaaaagaaggaggtt

SEQ ID NO: 694 - DNA, 21 bp, Homo sapiens
  source 1..21: mol_type = genomic DNA
tctcaacatcgctgatctagt

SEQ ID NO: 695 - DNA, 20 bp, Homo sapiens
  source 1..20: mol_type = genomic DNA
aggtagctggaaaaggagaa

SEQ ID NO: 696 - DNA, 21 bp, Homo sapiens
  source 1..21: mol_type = genomic DNA
tgaaattgcccagaattgagt

SEQ ID NO: 697 - DNA, 20 bp, Homo sapiens
  source 1..20: mol_type = genomic DNA
attttcctggacttctgaca

SEQ ID NO: 698 - DNA, 21 bp, Homo sapiens
  source 1..21: mol_type = genomic DNA
tgttattcctcttcctgtcca

SEQ ID NO: 699 - DNA, 20 bp, Homo sapiens
  source 1..20: mol_type = genomic DNA
taaccacacaactacagctt

SEQ ID NO: 700 - DNA, 20 bp, Homo sapiens
  source 1..20: mol_type = genomic DNA
attcaaaatggggacgagag

SEQ ID NO: 701 - DNA, 19 bp, Homo sapiens
  source 1..19: mol_type = genomic DNA
tcccagtttgctactctgg

SEQ ID NO: 702 - DNA, 24 bp, Homo sapiens
  source 1..24: mol_type = genomic DNA
tctcattatgtgaagattgctttc

SEQ ID NO: 703 - DNA, 23 bp, Homo sapiens
  source 1..23: mol_type = genomic DNA
ttaagattaagcagtcttcttgg

SEQ ID NO: 704 - DNA, 20 bp, Homo sapiens
  source 1..20: mol_type = genomic DNA
caacagatctgattctgccc

SEQ ID NO: 705 - DNA, 20 bp, Homo sapiens
  source 1..20: mol_type = genomic DNA
catgtgtttcaaagttggct

SEQ ID NO: 706 - DNA, 21 bp, Homo sapiens
  source 1..21: mol_type = genomic DNA
actatagcattagggtgaggg

SEQ ID NO: 707 - DNA, 20 bp, Homo sapiens
  source 1..20: mol_type = genomic DNA
gagatttggacatgctttca

SEQ ID NO: 708 - DNA, 19 bp, Homo sapiens
  source 1..19: mol_type = genomic DNA
cccaccaccagttgtcatc

SEQ ID NO: 709 - DNA, 21 bp, Homo sapiens
  source 1..21: mol_type = genomic DNA
gccactcacttcctagataat

SEQ ID NO: 710 - DNA, 20 bp, Homo sapiens
  source 1..20: mol_type = genomic DNA
acagtatctcagggccttat

SEQ ID NO: 711 - DNA, 21 bp, Homo sapiens
  source 1..21: mol_type = genomic DNA
tcagtagttcctcagatgcta

SEQ ID NO: 712 - DNA, 20 bp, Homo sapiens
  source 1..20: mol_type = genomic DNA
aatgcatgaaagtccaggaa

SEQ ID NO: 713 - DNA, 21 bp, Homo sapiens
  source 1..21: mol_type = genomic DNA
acatgcactcttgtcttatgc

SEQ ID NO: 714 - DNA, 22 bp, Homo sapiens
  source 1..22: mol_type = genomic DNA
cacatatactggctttctggtc

SEQ ID NO: 715 - DNA, 19 bp, Homo sapiens
  source 1..19: mol_type = genomic DNA
gcacatgtcattagcaggg

SEQ ID NO: 716 - DNA, 20 bp, Homo sapiens
  source 1..20: mol_type = genomic DNA
acatgctcaattatggagcc

SEQ ID NO: 717 - DNA, 20 bp, Homo sapiens
  source 1..20: mol_type = genomic DNA
acaaagacaggaatagggct

SEQ ID NO: 718 - DNA, 24 bp, Homo sapiens
  source 1..24: mol_type = genomic DNA
caatctgctgacttgcttcttttc

SEQ ID NO: 719 - DNA, 21 bp, Homo sapiens
  source 1..21: mol_type = genomic DNA
ctttggctcagaatcttccaa

SEQ ID NO: 720 - DNA, 21 bp, Homo sapiens
  source 1..21: mol_type = genomic DNA
tgtatgaggaccagcagtaaa

SEQ ID NO: 721 - DNA, 20 bp, Homo sapiens
  source 1..20: mol_type = genomic DNA
tcttttccccttgtgcatag

SEQ ID NO: 722 - DNA, 20 bp, Homo sapiens
  source 1..20: mol_type = genomic DNA
gcttagtgtgtgtgatccgt

SEQ ID NO: 723 - DNA, 20 bp, Homo sapiens
  source 1..20: mol_type = genomic DNA
actcacctttcccaagaaga

SEQ ID NO: 724 - DNA, 20 bp, Homo sapiens
  source 1..20: mol_type = genomic DNA
tggtagtgggaagaggttga

SEQ ID NO: 725 - DNA, 20 bp, Homo sapiens
  source 1..20: mol_type = genomic DNA
gcatggagaacaaaagctga

SEQ ID NO: 726 - DNA, 20 bp, Homo sapiens
  source 1..20: mol_type = genomic DNA
tgtgagcaagaaactgaagg

SEQ ID NO: 727 - DNA, 20 bp, Homo sapiens
  source 1..20: mol_type = genomic DNA
agtatcacttgtccagctca

SEQ ID NO: 728 - DNA, 20 bp, Homo sapiens
  source 1..20: mol_type = genomic DNA
cacaggactaggtaggcttt

SEQ ID NO: 729 - DNA, 21 bp, Homo sapiens
  source 1..21: mol_type = genomic DNA
gtgttaacagctttcccttca

SEQ ID NO: 730 - DNA, 23 bp, Homo sapiens
  source 1..23: mol_type = genomic DNA
tcatgtacagaaagaattagcct

SEQ ID NO: 731 - DNA, 20 bp, Homo sapiens
  source 1..20: mol_type = genomic DNA
agaggccaagtgaccaaata

SEQ ID NO: 732 - DNA, 21 bp, Homo sapiens
  source 1..21: mol_type = genomic DNA
aagccagtaattcatcttccc

SEQ ID NO: 733 - DNA, 21 bp, Homo sapiens
  source 1..21: mol_type = genomic DNA
ccatgacataacacatcacca

SEQ ID NO: 734 - DNA, 20 bp, Homo sapiens
  source 1..20: mol_type = genomic DNA
atagatttcctcctgggctg

SEQ ID NO: 735 - DNA, 20 bp, Homo sapiens
  source 1..20: mol_type = genomic DNA
ccacctctgtacccactatc

SEQ ID NO: 736 - DNA, 20 bp, Homo sapiens
  source 1..20: mol_type = genomic DNA
ttccctggaagatagccaat

SEQ ID NO: 737 - DNA, 20 bp, Homo sapiens
  source 1..20: mol_type = genomic DNA
tggacacgtaaaagaaggtg

SEQ ID NO: 738 - DNA, 20 bp, Homo sapiens
  source 1..20: mol_type = genomic DNA
ctgagaaccttgtccaactg

SEQ ID NO: 739 - DNA, 20 bp, Homo sapiens
  source 1..20: mol_type = genomic DNA
tttcgctagtctttgcactt

SEQ ID NO: 740 - DNA, 20 bp, Homo sapiens
  source 1..20: mol_type = genomic DNA
gcggcaataattgtcacaaa

SEQ ID NO: 741 - DNA, 20 bp, Homo sapiens
  source 1..20: mol_type = genomic DNA
cagaaatgtgtcaggctaca

SEQ ID NO: 742 - DNA, 20 bp, Homo sapiens
  source 1..20: mol_type = genomic DNA
aactcttcattttgacgggg

SEQ ID NO: 743 - DNA, 20 bp, Homo sapiens
  source 1..20: mol_type = genomic DNA
tgggttgtgctgttgtttag

SEQ ID NO: 744 - DNA, 19 bp, Homo sapiens
  source 1..19: mol_type = genomic DNA
gctcagctcctttcatctg

SEQ ID NO: 745 - DNA, 20 bp, Homo sapiens
  source 1..20: mol_type = genomic DNA
aggacattcagcctatttgc

SEQ ID NO: 746 - DNA, 20 bp, Homo sapiens
  source 1..20: mol_type = genomic DNA
acacagtatcaaggtcaaca

SEQ ID NO: 747 - DNA, 20 bp, Homo sapiens
  source 1..20: mol_type = genomic DNA
gcagaaccacagtctatgag

SEQ ID NO: 748 - DNA, 21 bp, Homo sapiens
  source 1..21: mol_type = genomic DNA
aatgctccaagttattccaga

SEQ ID NO: 749 - DNA, 20 bp, Homo sapiens
  source 1..20: mol_type = genomic DNA
aagagagaagcgacaaaacc

SEQ ID NO: 750 - DNA, 20 bp, Homo sapiens
  source 1..20: mol_type = genomic DNA
aatgagaaggaattgggtgc

SEQ ID NO: 751 - DNA, 20 bp, Homo sapiens
  source 1..20: mol_type = genomic DNA
aatgaagtgttagggccatc

SEQ ID NO: 752 - DNA, 21 bp, Homo sapiens
  source 1..21: mol_type = genomic DNA
gctcatcacagtttaaggagt

SEQ ID NO: 753 - DNA, 20 bp, Homo sapiens
  source 1..20: mol_type = genomic DNA
atgtggaagcaagagaaagg

SEQ ID NO: 754 - DNA, 20 bp, Homo sapiens
  source 1..20: mol_type = genomic DNA
tgaaaggtgaagtggctttt

SEQ ID NO: 755 - DNA, 20 bp, Homo sapiens
  source 1..20: mol_type = genomic DNA
gtaagtaaggggtcctagct

SEQ ID NO: 756 - DNA, 20 bp, Homo sapiens
  source 1..20: mol_type = genomic DNA
tgtgacttccatgaaactgg

SEQ ID NO: 757 - DNA, 20 bp, Homo sapiens
  source 1..20: mol_type = genomic DNA
gctgacaaactaaccttcca

SEQ ID NO: 758 - DNA, 20 bp, Homo sapiens
  source 1..20: mol_type = genomic DNA
aaaacctcccaaaacagact

SEQ ID NO: 759 - DNA, 20 bp, Homo sapiens
  source 1..20: mol_type = genomic DNA
agtttagtggccacgtgaaa

SEQ ID NO: 760 - DNA, 20 bp, Homo sapiens
  source 1..20: mol_type = genomic DNA
ggcagaagtttcaattccct

SEQ ID NO: 761 - DNA, 20 bp, Homo sapiens
  source 1..20: mol_type = genomic DNA
aaagcctctgtttgcacttt

SEQ ID NO: 762 - DNA, 20 bp, Homo sapiens
  source 1..20: mol_type = genomic DNA
tcagtcagcttcttgagtca

SEQ ID NO: 763 - DNA, 20 bp, Homo sapiens
  source 1..20: mol_type = genomic DNA
tgtttcatttgggtcatgga

SEQ ID NO: 764 - DNA, 21 bp, Homo sapiens
  source 1..21: mol_type = genomic DNA
tacagcactaggatcactctg

SEQ ID NO: 765 - DNA, 20 bp, Homo sapiens
  source 1..20: mol_type = genomic DNA
atgcatgtttcttgcaaagg

SEQ ID NO: 766 - DNA, 20 bp, Homo sapiens
  source 1..20: mol_type = genomic DNA
gtaggattcagggcatttca

SEQ ID NO: 767 - DNA, 19 bp, Homo sapiens
  source 1..19: mol_type = genomic DNA
aactggaactgagcgtgag

SEQ ID NO: 768 - DNA, 20 bp, Homo sapiens
  source 1..20: mol_type = genomic DNA
tgtatgcagttacctccaga

SEQ ID NO: 769 - DNA, 20 bp, Homo sapiens
  source 1..20: mol_type = genomic DNA
ggatgtataccagacccctt

SEQ ID NO: 770 - DNA, 20 bp, Homo sapiens
  source 1..20: mol_type = genomic DNA
cgaaagatgttagcacctca

SEQ ID NO: 771 - DNA, 20 bp, Homo sapiens
  source 1..20: mol_type = genomic DNA
aattggctttgcagtgtttc

SEQ ID NO: 772 - DNA, 20 bp, Homo sapiens
  source 1..20: mol_type = genomic DNA
gcttgctggtaggaggtata

SEQ ID NO: 773 - DNA, 20 bp, Homo sapiens
  source 1..20: mol_type = genomic DNA
ctggaaacggaaggaagttg

SEQ ID NO: 774 - DNA, 20 bp, Homo sapiens
  source 1..20: mol_type = genomic DNA
ctgtgttcagtaagtggctg

SEQ ID NO: 775 - DNA, 20 bp, Homo sapiens
  source 1..20: mol_type = genomic DNA
gacagtgaagtgtgatcgtt

SEQ ID NO: 776 - DNA, 20 bp, Homo sapiens
  source 1..20: mol_type = genomic DNA
tggtgatgctgttttggaaa

SEQ ID NO: 777 - DNA, 22 bp, Homo sapiens
  source 1..22: mol_type = genomic DNA
ttctttcaggcagaagaaatga

SEQ ID NO: 778 - DNA, 24 bp, Homo sapiens
  source 1..24: mol_type = genomic DNA
aagttccattactgtattgaaaat

SEQ ID NO: 779 - DNA, 20 bp, Homo sapiens
  source 1..20: mol_type = genomic DNA
ggacgtacgtgcttatttca

SEQ ID NO: 780 - DNA, 21 bp, Homo sapiens
  source 1..21: mol_type = genomic DNA
cagcctgatattcccattgag

SEQ ID NO: 781 - DNA, 20 bp, Homo sapiens
  source 1..20: mol_type = genomic DNA
tcatgaggctgagtgagtat

SEQ ID NO: 782 - DNA, 20 bp, Homo sapiens
  source 1..20: mol_type = genomic DNA
aaagctctcctatctccagt

SEQ ID NO: 783 - DNA, 21 bp, Homo sapiens
  source 1..21: mol_type = genomic DNA
acaaagagtctggactatcct

SEQ ID NO: 784 - DNA, 21 bp, Homo sapiens
  source 1..21: mol_type = genomic DNA
tgcctaaaaatacccaaagct

SEQ ID NO: 785 - DNA, 20 bp, Homo sapiens
  source 1..20: mol_type = genomic DNA
ccaagacactcactccaaag

SEQ ID NO: 786 - DNA, 20 bp, Homo sapiens
  source 1..20: mol_type = genomic DNA
ccaggaaaaggagcagtttt

SEQ ID NO: 787 - DNA, 20 bp, Homo sapiens
  source 1..20: mol_type = genomic DNA
gttcaactctttctgcgaac

SEQ ID NO: 788 - DNA, 20 bp, Homo sapiens
  source 1..20: mol_type = genomic DNA
ccacttcttctgtttccaac

SEQ ID NO: 789 - DNA, 19 bp, Homo sapiens
  source 1..19: mol_type = genomic DNA
gggaagggcatgctaatca

SEQ ID NO: 790 - DNA, 20 bp, Homo sapiens
  source 1..20: mol_type = genomic DNA
tgttcaatcacctctccatc

SEQ ID NO: 791 - DNA, 20 bp, Homo sapiens
  source 1..20: mol_type = genomic DNA
agaggagaggctaagctttg

SEQ ID NO: 792 - DNA, 20 bp, Homo sapiens
  source 1..20: mol_type = genomic DNA
acaagagaggaagctgtcag

SEQ ID NO: 793 - DNA, 20 bp, Homo sapiens
  source 1..20: mol_type = genomic DNA
agcccctttctccttattct

SEQ ID NO: 794 - DNA, 20 bp, Homo sapiens
  source 1..20: mol_type = genomic DNA
agggaagcaggattttaacg

SEQ ID NO: 795 - DNA, 20 bp, Homo sapiens
  source 1..20: mol_type = genomic DNA
aagtttcacaatacccaggt

SEQ ID NO: 796 - DNA, 20 bp, Homo sapiens
  source 1..20: mol_type = genomic DNA
tcgcagaatggacaagtact

SEQ ID NO: 797 - DNA, 20 bp, Homo sapiens
  source 1..20: mol_type = genomic DNA
ggctcccagattttgatcat

SEQ ID NO: 798 - DNA, 20 bp, Homo sapiens
  source 1..20: mol_type = genomic DNA
cctagaactgcaaaacacct

SEQ ID NO: 799 - DNA, 21 bp, Homo sapiens
  source 1..21: mol_type = genomic DNA
ttccattattttctcaccggc

SEQ ID NO: 800 - DNA, 20 bp, Homo sapiens
  source 1..20: mol_type = genomic DNA
cagtccaacaaagaggtcac

SEQ ID NO: 801 - DNA, 20 bp, Homo sapiens
  source 1..20: mol_type = genomic DNA
ttgtgtgtgttgaagcctag

SEQ ID NO: 802 - DNA, 20 bp, Homo sapiens
  source 1..20: mol_type = genomic DNA
agtgggggtaggaagaaaaa

SEQ ID NO: 803 - DNA, 20 bp, Homo sapiens
  source 1..20: mol_type = genomic DNA
gttccaacaatgtaaggcac

SEQ ID NO: 804 - DNA, 20 bp, Homo sapiens
  source 1..20: mol_type = genomic DNA
ggaaccctctatggtcaaag

SEQ ID NO: 805 - DNA, 20 bp, Homo sapiens
  source 1..20: mol_type = genomic DNA
attgctgtgtagttccttga

SEQ ID NO: 806 - DNA, 20 bp, Homo sapiens
  source 1..20: mol_type = genomic DNA
tttcttgccaccattctgac

SEQ ID NO: 807 - DNA, 20 bp, Homo sapiens
  source 1..20: mol_type = genomic DNA
cacacgttctaaccaagtgc

SEQ ID NO: 808 - DNA, 21 bp, Homo sapiens
  source 1..21: mol_type = genomic DNA
tagccacatcttaacagacct

SEQ ID NO: 809 - DNA, 20 bp, Homo sapiens
  source 1..20: mol_type = genomic DNA
attcctgagggtgacatgaa

SEQ ID NO: 810 - DNA, 20 bp, Homo sapiens
  source 1..20: mol_type = genomic DNA
cctgccccatcaacttaaaa

SEQ ID NO: 811 - DNA, 18 bp, Homo sapiens
  source 1..18: mol_type = genomic DNA
ctgggtgcagaggatctc

SEQ ID NO: 812 - DNA, 22 bp, Homo sapiens
  source 1..22: mol_type = genomic DNA
ttgagttgaactttgctttaga

SEQ ID NO: 813 - DNA, 20 bp, Homo sapiens
  source 1..20: mol_type = genomic DNA
gaactaggagacactgggtt

SEQ ID NO: 814 - DNA, 21 bp, Homo sapiens
  source 1..21: mol_type = genomic DNA
caagaatagctaactggtgct

SEQ ID NO: 815 - DNA, 21 bp, Homo sapiens
  source 1..21: mol_type = genomic DNA
agttacacactgaatcatggg

SEQ ID NO: 816 - DNA, 20 bp, Homo sapiens
  source 1..20: mol_type = genomic DNA
cccatgtggcttcactaata

SEQ ID NO: 817 - DNA, 20 bp, Homo sapiens
  source 1..20: mol_type = genomic DNA
gattgtggtcacgtggagag

SEQ ID NO: 818 - DNA, 20 bp, Homo sapiens
  source 1..20: mol_type = genomic DNA
cagatccaggtattcggaga

SEQ ID NO: 819 - DNA, 20 bp, Homo sapiens
  source 1..20: mol_type = genomic DNA
acaacaacaaccattaccca

SEQ ID NO: 820 - DNA, 20 bp, Homo sapiens
  source 1..20: mol_type = genomic DNA
tggccatagtactgcttgta

SEQ ID NO: 821 - DNA, 20 bp, Homo sapiens
  source 1..20: mol_type = genomic DNA
tgtctcactgttgggaactt

SEQ ID NO: 822 - DNA, 20 bp, Homo sapiens
  source 1..20: mol_type = genomic DNA
tttgtctgtatcctatgccc

SEQ ID NO: 823 - DNA, 20 bp, Homo sapiens
  source 1..20: mol_type = genomic DNA
gctgacaaaattggatccca

SEQ ID NO: 824 - DNA, 20 bp, Homo sapiens
  source 1..20: mol_type = genomic DNA
aaaatcctcctgagtcctct

SEQ ID NO: 825 - DNA, 20 bp, Homo sapiens
  source 1..20: mol_type = genomic DNA
ttcactgggctcttcagcta

SEQ ID NO: 826 - DNA, 20 bp, Homo sapiens
  source 1..20: mol_type = genomic DNA
aaagggcaggagttaggtaa

SEQ ID NO: 827 - DNA, 20 bp, Homo sapiens
  source 1..20: mol_type = genomic DNA
aggcataagaaaccaggttg

SEQ ID NO: 828 - DNA, 20 bp, Homo sapiens
  source 1..20: mol_type = genomic DNA
gtagttcggtccaatgtcag

SEQ ID NO: 829 - DNA, 20 bp, Homo sapiens
  source 1..20: mol_type = genomic DNA
gatggtcacaattgcaggtt

SEQ ID NO: 830 - DNA, 20 bp, Homo sapiens
  source 1..20: mol_type = genomic DNA
gccaaagatctcaattgcca

SEQ ID NO: 831 - DNA, 20 bp, Homo sapiens
  source 1..20: mol_type = genomic DNA
gaccaagactgtctctcctt

SEQ ID NO: 832 - DNA, 22 bp, Homo sapiens
  source 1..22: mol_type = genomic DNA
taatggtcaaatccctctcaaa

SEQ ID NO: 833 - DNA, 20 bp, Homo sapiens
  source 1..20: mol_type = genomic DNA
catgtaggctgaagactcct

SEQ ID NO: 834 - DNA, 20 bp, Homo sapiens
  source 1..20: mol_type = genomic DNA
tttctctccaaactggttgc

SEQ ID NO: 835 - DNA, 21 bp, Homo sapiens
  source 1..21: mol_type = genomic DNA
tacaggcaagaaatagtgtct

SEQ ID NO: 836 - DNA, 20 bp, Homo sapiens
  source 1..20: mol_type = genomic DNA
ttcagcaagaatggggattc

SEQ ID NO: 837 - DNA, 20 bp, Homo sapiens
  source 1..20: mol_type = genomic DNA
caaagagagagccatcacag

SEQ ID NO: 838 - DNA, 21 bp, Homo sapiens
  source 1..21: mol_type = genomic DNA
tgagaacactgctatttctgc

SEQ ID NO: 839 - DNA, 18 bp, Homo sapiens
  source 1..18: mol_type = genomic DNA
gcatggtcaggacattgg

SEQ ID NO: 840 - DNA, 20 bp, Homo sapiens
  source 1..20: mol_type = genomic DNA
gattgaatcaggagggaagc

SEQ ID NO: 841 - DNA, 23 bp, Homo sapiens
  source 1..23: mol_type = genomic DNA
agcttaaatgatgaagtgctttc

SEQ ID NO: 842 - DNA, 20 bp, Homo sapiens
  source 1..20: mol_type = genomic DNA
ttctcctacgtatcttggca

SEQ ID NO: 843 - DNA, 20 bp, Homo sapiens
  source 1..20: mol_type = genomic DNA
acctgggacataaccttgat

SEQ ID NO: 844 - DNA, 20 bp, Homo sapiens
  source 1..20: mol_type = genomic DNA
ccattttcctactgcgtgtc

SEQ ID NO: 845 - DNA, 20 bp, Homo sapiens
  source 1..20: mol_type = genomic DNA
gaacataccaaacccactgg

SEQ ID NO: 846 - DNA, 20 bp, Homo sapiens
  source 1..20: mol_type = genomic DNA
acccaatgatgtacagttcc

SEQ ID NO: 847 - DNA, 22 bp, Homo sapiens
  source 1..22: mol_type = genomic DNA
acctattcgacttgaaactcag

SEQ ID NO: 848 - DNA, 20 bp, Homo sapiens
  source 1..20: mol_type = genomic DNA
atttctgcacaactgttcca

SEQ ID NO: 849 - DNA, 20 bp, Homo sapiens
  source 1..20: mol_type = genomic DNA
gctgtaatgtgactaaccct

SEQ ID NO: 850 - DNA, 20 bp, Homo sapiens
  source 1..20: mol_type = genomic DNA
tttcccgaggttcacagata

SEQ ID NO: 851 - DNA, 20 bp, Homo sapiens
  source 1..20: mol_type = genomic DNA
gaacttgtgtgacccaaaac

SEQ ID NO: 852 - DNA, 20 bp, Homo sapiens
  source 1..20: mol_type = genomic DNA
cattgcactgtgatgtcatg

SEQ ID NO: 853 - DNA, 20 bp, Homo sapiens
  source 1..20: mol_type = genomic DNA
gcactggaaattgacatcac

SEQ ID NO: 854 - DNA, 20 bp, Homo sapiens
  source 1..20: mol_type = genomic DNA
gggagaggctgaaagaagaa

SEQ ID NO: 855 - DNA, 20 bp, Homo sapiens
  source 1..20: mol_type = genomic DNA
tgtatcacttcctcatgcca

SEQ ID NO: 856 - DNA, 20 bp, Homo sapiens
  source 1..20: mol_type = genomic DNA
ccaagagtttcctgtttcca

SEQ ID NO: 857 - DNA, 22 bp, Homo sapiens
  source 1..22: mol_type = genomic DNA
atgacacatacatccatttaca

SEQ ID NO: 858 - DNA, 20 bp, Homo sapiens
  source 1..20: mol_type = genomic DNA
ctcaaactgcccagtgattt

SEQ ID NO: 859 - DNA, 20 bp, Homo sapiens
  source 1..20: mol_type = genomic DNA
tcctagcttgccaaagaaat

SEQ ID NO: 860 - DNA, 20 bp, Homo sapiens
  source 1..20: mol_type = genomic DNA
cctcctctccaggcatttta

SEQ ID NO: 861 - DNA, 20 bp, Homo sapiens
  source 1..20: mol_type = genomic DNA
aacagagtagcacagagagt

SEQ ID NO: 862 - DNA, 20 bp, Homo sapiens
  source 1..20: mol_type = genomic DNA
ttcagagagacagacagcat

SEQ ID NO: 863 - DNA, 20 bp, Homo sapiens
  source 1..20: mol_type = genomic DNA
agaggaaaatcacaagcagt

SEQ ID NO: 864 - DNA, 20 bp, Homo sapiens
  source 1..20: mol_type = genomic DNA
tttgaaaacccaacagacct

SEQ ID NO: 865 - DNA, 20 bp, Homo sapiens
  source 1..20: mol_type = genomic DNA
aatccacacaccaacagagg

SEQ ID NO: 866 - DNA, 21 bp, Homo sapiens
  source 1..21: mol_type = genomic DNA
tgttcacatctgttggtttgc

SEQ ID NO: 867 - DNA, 21 bp, Homo sapiens
  source 1..21: mol_type = genomic DNA
gttactcggtgggtgatattt

SEQ ID NO: 868 - DNA, 21 bp, Homo sapiens
  source 1..21: mol_type = genomic DNA
aagaaacaccagcatcagttc

SEQ ID NO: 869 - DNA, 21 bp, Homo sapiens
  source 1..21: mol_type = genomic DNA
aggtttagaggtgagtgaaca

SEQ ID NO: 870 - DNA, 22 bp, Homo sapiens
  source 1..22: mol_type = genomic DNA
agaaacttcactgtcttccact

SEQ ID NO: 871 - DNA, 21 bp, Homo sapiens
  source 1..21: mol_type = genomic DNA
tgtgatggacattggtacctg

SEQ ID NO: 872 - DNA, 21 bp, Homo sapiens
  source 1..21: mol_type = genomic DNA
atatcatctgcctgtcccaac

SEQ ID NO: 873 - DNA, 21 bp, Homo sapiens
  source 1..21: mol_type = genomic DNA
gagtgctctgtgtttgtttca

SEQ ID NO: 874 - DNA, 22 bp, Homo sapiens
  source 1..22: mol_type = genomic DNA
tcagtggtgagctcttgaatat

SEQ ID NO: 875 - DNA, 21 bp, Homo sapiens
  source 1..21: mol_type = genomic DNA
actctctcttcacacatgcaa

SEQ ID NO: 876 - DNA, 21 bp, Homo sapiens
  source 1..21: mol_type = genomic DNA
gtgttgaagtcagtaaagcct

SEQ ID NO: 877 - DNA, 21 bp, Homo sapiens
  source 1..21: mol_type = genomic DNA
tgctttcacatggcactagat

SEQ ID NO: 878 - DNA, 21 bp, Homo sapiens
  source 1..21: mol_type = genomic DNA
ggagagagaaatcccaactga

SEQ ID NO: 879 - DNA, 21 bp, Homo sapiens
  source 1..21: mol_type = genomic DNA
gggagatgtcaacactaggtc

SEQ ID NO: 880 - DNA, 20 bp, Homo sapiens
  source 1..20: mol_type = genomic DNA
atatgacatggtggctctcc

SEQ ID NO: 881 - DNA, 21 bp, Homo sapiens
  source 1..21: mol_type = genomic DNA
aacatagagccatgggaggta

SEQ ID NO: 882 - DNA, 21 bp, Homo sapiens
  source 1..21: mol_type = genomic DNA
gatagccttcaaatcatgcct

SEQ ID NO: 883 - DNA, 21 bp, Homo sapiens
  source 1..21: mol_type = genomic DNA
gaaagcgggtgaacaacaata

SEQ ID NO: 884 - DNA, 21 bp, Homo sapiens
  source 1..21: mol_type = genomic DNA
gatagagagcacaaagagcat

SEQ ID NO: 885 - DNA, 21 bp, Homo sapiens
  source 1..21: mol_type = genomic DNA
aacaagaggaataggagccag

SEQ ID NO: 886 - DNA, 21 bp, Homo sapiens
  source 1..21: mol_type = genomic DNA
tgggtgctgatagtaacaaag

SEQ ID NO: 887 - DNA, 21 bp, Homo sapiens
  source 1..21: mol_type = genomic DNA
actattgaactgttggcttcg

SEQ ID NO: 888 - DNA, 21 bp, Homo sapiens
  source 1..21: mol_type = genomic DNA
tccactaaagagcaaccaaac

SEQ ID NO: 889 - DNA, 21 bp, Homo sapiens
  source 1..21: mol_type = genomic DNA
tgaagtggtcagtaacaatgg

SEQ ID NO: 890 - DNA, 21 bp, Homo sapiens
  source 1..21: mol_type = genomic DNA
atttcagagctcctttgtcct

SEQ ID NO: 891 - DNA, 21 bp, Homo sapiens
  source 1..21: mol_type = genomic DNA
ggcaaagaaatctggtgttca

SEQ ID NO: 892 - DNA, 21 bp, Homo sapiens
  source 1..21: mol_type = genomic DNA
ttgctggttgataggcatttg

SEQ ID NO: 893 - DNA, 21 bp, Homo sapiens
  source 1..21: mol_type = genomic DNA
attcccgcaattgtgagattc

SEQ ID NO: 894 - DNA, 22 bp, Homo sapiens
  source 1..22: mol_type = genomic DNA
aaagaggtacagaactcagacc

SEQ ID NO: 895 - DNA, 21 bp, Homo sapiens
  source 1..21: mol_type = genomic DNA
gtcttcatgaacgttgccaat

SEQ ID NO: 896 - DNA, 21 bp, Homo sapiens
  source 1..21: mol_type = genomic DNA
cttctcagggctctttgtgta

SEQ ID NO: 897 - DNA, 21 bp, Homo sapiens
  source 1..21: mol_type = genomic DNA
gcaacagaaaccaagattcct

SEQ ID NO: 898 - DNA, 22 bp, Homo sapiens
  source 1..22: mol_type = genomic DNA
tcattgtctacctcaaagagca

SEQ ID NO: 899 - DNA, 21 bp, Homo sapiens
  source 1..21: mol_type = genomic DNA
ctctgaaggaacaaaggatgg

SEQ ID NO: 900 - DNA, 21 bp, Homo sapiens
  source 1..21: mol_type = genomic DNA
cattagaatgcggtggtttca

SEQ ID NO: 901 - DNA, 21 bp, Homo sapiens
  source 1..21: mol_type = genomic DNA
gatgtctgggctgaggtttaa

SEQ ID NO: 902 - DNA, 21 bp, Homo sapiens
  source 1..21: mol_type = genomic DNA
ttcctcttgaagatgcactgg

SEQ ID NO: 903 - DNA, 21 bp, Homo sapiens
  source 1..21: mol_type = genomic DNA
ccagcatgtgaggaattgaac

SEQ ID NO: 904 - DNA, 21 bp, Homo sapiens
  source 1..21: mol_type = genomic DNA
cccacttagtcatccacacat

SEQ ID NO: 905 - DNA, 21 bp, Homo sapiens
  source 1..21: mol_type = genomic DNA
gtttcacacaccagaagagag

SEQ ID NO: 906 - DNA, 21 bp, Homo sapiens
  source 1..21: mol_type = genomic DNA
ccatacacctgctctgacatt

SEQ ID NO: 907 - DNA, 21 bp, Homo sapiens
  source 1..21: mol_type = genomic DNA
atcagtaacagtcccattgct

SEQ ID NO: 908 - DNA, 21 bp, Homo sapiens
  source 1..21: mol_type = genomic DNA
catgaggcatttgatccatgg

SEQ ID NO: 909 - DNA, 21 bp, Homo sapiens
  source 1..21: mol_type = genomic DNA
accctgtttcactgaacaact

SEQ ID NO: 910 - DNA, 21 bp, Homo sapiens
  source 1..21: mol_type = genomic DNA
ccctgtaatgagagcgttatt

SEQ ID NO: 911 - DNA, 22 bp, Homo sapiens
  source 1..22: mol_type = genomic DNA
gagagaatgggttaaatctgcc

SEQ ID NO: 912 - DNA, 21 bp, Homo sapiens
  source 1..21: mol_type = genomic DNA
ctgcctgacttagccttaaat

SEQ ID NO: 913 - DNA, 21 bp, Homo sapiens
  source 1..21: mol_type = genomic DNA
aaccagaatgttactagccca

SEQ ID NO: 914 - DNA, 21 bp, Homo sapiens
  source 1..21: mol_type = genomic DNA
caatcctgtgtgtttagtgga

SEQ ID NO: 915 - DNA, 20 bp, Homo sapiens
  source 1..20: mol_type = genomic DNA
tgtgggaagcattgactctt

SEQ ID NO: 916 - DNA, 21 bp, Homo sapiens
  source 1..21: mol_type = genomic DNA
tcctgtgagaaatggagcttt

SEQ ID NO: 917 - DNA, 22 bp, Homo sapiens
  source 1..22: mol_type = genomic DNA
gttgccaagcttaaatacctgt

SEQ ID NO: 918 - DNA, 21 bp, Homo sapiens
  source 1..21: mol_type = genomic DNA
ccacaacaacataaacactgc

SEQ ID NO: 919 - DNA, 21 bp, Homo sapiens
  source 1..21: mol_type = genomic DNA
tcttccaggcatattcattgc

SEQ ID NO: 920 - DNA, 21 bp, Homo sapiens
  source 1..21: mol_type = genomic DNA
atccattctctctacttggga

SEQ ID NO: 921 - DNA, 22 bp, Homo sapiens
  source 1..22: mol_type = genomic DNA
ggctagagggtgattataagct

SEQ ID NO: 922 - DNA, 21 bp, Homo sapiens
  source 1..21: mol_type = genomic DNA
tactcatcccgatttcttccc

SEQ ID NO: 923 - DNA, 21 bp, Homo sapiens
  source 1..21: mol_type = genomic DNA
ttctctttctcttctgggcag

SEQ ID NO: 924 - DNA, 21 bp, Homo sapiens
  source 1..21: mol_type = genomic DNA
ttgtgagactcaaggccattt

SEQ ID NO: 925 - DNA, 21 bp, Homo sapiens
  source 1..21: mol_type = genomic DNA
ttggtagagagaggccatttg

SEQ ID NO: 926 - DNA, 21 bp, Homo sapiens
  source 1..21: mol_type = genomic DNA
ggaggaagctcttgaagacat

SEQ ID NO: 927 - DNA, 21 bp, Homo sapiens
  source 1..21: mol_type = genomic DNA
agcatcttccgtttaactcca

SEQ ID NO: 928 - DNA, 20 bp, Homo sapiens
  source 1..20: mol_type = genomic DNA
ctgcctgccaagtatgttct

SEQ ID NO: 929 - DNA, 21 bp, Homo sapiens
  source 1..21: mol_type = genomic DNA
ctactccttgtgtcattggct

SEQ ID NO: 930 - DNA, 21 bp, Homo sapiens
  source 1..21: mol_type = genomic DNA
tgattctgagacacgtgctta

SEQ ID NO: 931 - DNA, 21 bp, Homo sapiens
  source 1..21: mol_type = genomic DNA
cttgaggacctttcatgcttg

SEQ ID NO: 932 - DNA, 21 bp, Homo sapiens
  source 1..21: mol_type = genomic DNA
ttgtgatttcaggtaggaggg

SEQ ID NO: 933 - DNA, 21 bp, Homo sapiens
  source 1..21: mol_type = genomic DNA
ttccctcagagacagtatcct

SEQ ID NO: 934 - DNA, 20 bp, Homo sapiens
  source 1..20: mol_type = genomic DNA
aaaggaggtctggctttgaa

SEQ ID NO: 935 - DNA, 21 bp, Homo sapiens
  source 1..21: mol_type = genomic DNA
gcataaacctggactgtgaaa

SEQ ID NO: 936 - DNA, 20 bp, Homo sapiens
  source 1..20: mol_type = genomic DNA
cactcagcgattctcctcac

SEQ ID NO: 937 - DNA, 21 bp, Homo sapiens
  source 1..21: mol_type = genomic DNA
aaagccagacacagactagtt

SEQ ID NO: 938 - DNA, 20 bp, Homo sapiens
  source 1..20: mol_type = genomic DNA
attcctgggaccacaagcat

SEQ ID NO: 939 - DNA, 20 bp, Homo sapiens
  source 1..20: mol_type = genomic DNA
tattgcctcatgtggttgtg

SEQ ID NO: 940 - DNA, 22 bp, Homo sapiens
  source 1..22: mol_type = genomic DNA
gtgttgacttgaaaggaatcac

SEQ ID NO: 941 - DNA, 21 bp, Homo sapiens
  source 1..21: mol_type = genomic DNA
caggttaggaatgacagtggg

SEQ ID NO: 942 - DNA, 21 bp, Homo sapiens
  source 1..21: mol_type = genomic DNA
ttaggttacccagggacgtta

SEQ ID NO: 943 - DNA, 21 bp, Homo sapiens
  source 1..21: mol_type = genomic DNA
cggtttgctttctgaacaaca

SEQ ID NO: 944 - DNA, 21 bp, Homo sapiens
  source 1..21: mol_type = genomic DNA
catttgggaccctttgaaact

SEQ ID NO: 945 - DNA, 21 bp, Homo sapiens
  source 1..21: mol_type = genomic DNA
ggttatctctgggcaaagttc

SEQ ID NO: 946 - DNA, 21 bp, Homo sapiens
  source 1..21: mol_type = genomic DNA
tagagagcagagaacaaaccc

SEQ ID NO: 947 - DNA, 21 bp, Homo sapiens
  source 1..21: mol_type = genomic DNA
ataagggcatttggagggaaa

SEQ ID NO: 948 - DNA, 21 bp, Homo sapiens
  source 1..21: mol_type = genomic DNA
aatgcacacttagacaccaca

SEQ ID NO: 949 - DNA, 21 bp, Homo sapiens
  source 1..21: mol_type = genomic DNA
ggattgctacccaggagataa

SEQ ID NO: 950 - DNA, 21 bp, Homo sapiens
  source 1..21: mol_type = genomic DNA
agaggttctgtgtatgagtgt

SEQ ID NO: 951 - DNA, 21 bp, Homo sapiens
  source 1..21: mol_type = genomic DNA
tagagaattgtacgctggaca

SEQ ID NO: 952 - DNA, 21 bp, Homo sapiens
  source 1..21: mol_type = genomic DNA
tctggagaaatgcacaagaga

SEQ ID NO: 953 - DNA, 21 bp, Homo sapiens
  source 1..21: mol_type = genomic DNA
tgggttagaacatggtgctta

SEQ ID NO: 954 - DNA, 21 bp, Homo sapiens
  source 1..21: mol_type = genomic DNA
atcgcatcacacccttactat

SEQ ID NO: 955 - DNA, 21 bp, Homo sapiens
  source 1..21: mol_type = genomic DNA
ggaaatttagcttgacatggc

SEQ ID NO: 956 - DNA, 22 bp, Homo sapiens
  source 1..22: mol_type = genomic DNA
tttgtaaatccacagtgcctac

SEQ ID NO: 957 - DNA, 21 bp, Homo sapiens
  source 1..21: mol_type = genomic DNA
ggtactggagagcatagaaga

SEQ ID NO: 958 - DNA, 21 bp, Homo sapiens
  source 1..21: mol_type = genomic DNA
aaacaagctatcttcaggcag

SEQ ID NO: 959 - DNA, 21 bp, Homo sapiens
  source 1..21: mol_type = genomic DNA
cgaacaatcagagactcgact

SEQ ID NO: 960 - DNA, 21 bp, Homo sapiens
  source 1..21: mol_type = genomic DNA
ctggttgacaatctgcaagtt

SEQ ID NO: 961 - DNA, 21 bp, Homo sapiens
  source 1..21: mol_type = genomic DNA
accatccaagtcgtcttcata

SEQ ID NO: 962 - DNA, 21 bp, Homo sapiens
  source 1..21: mol_type = genomic DNA
atagctacgcataccctgtag

SEQ ID NO: 963 - DNA, 21 bp, Homo sapiens
  source 1..21: mol_type = genomic DNA
agcagaagaaacagtaaggca

SEQ ID NO: 964 - DNA, 20 bp, Homo sapiens
  source 1..20: mol_type = genomic DNA
acccagggacctatttgttc

SEQ ID NO: 965 - DNA, 21 bp, Homo sapiens
  source 1..21: mol_type = genomic DNA
caagggctcaggtcttcatta

SEQ ID NO: 966 - DNA, 21 bp, Homo sapiens
  source 1..21: mol_type = genomic DNA
tcactgtgacttggagactaa

SEQ ID NO: 967 - DNA, 21 bp, Homo sapiens
  source 1..21: mol_type = genomic DNA
tgctctgcttcactgtgatta

SEQ ID NO: 968 - DNA, 22 bp, Homo sapiens
  source 1..22: mol_type = genomic DNA
gatgaatgactaatagcccacg

SEQ ID NO: 969 - DNA, 21 bp, Homo sapiens
  source 1..21: mol_type = genomic DNA
ccatgtttagtttggtgctgt

SEQ ID NO: 970 - DNA, 20 bp, Homo sapiens
  source 1..20: mol_type = genomic DNA
agccaagtgaggtgctaaat

SEQ ID NO: 971 - DNA, 21 bp, Homo sapiens
  source 1..21: mol_type = genomic DNA
tcagggagaaatgatgtcacc

SEQ ID NO: 972 - DNA, 21 bp, Homo sapiens
  source 1..21: mol_type = genomic DNA
cagtagctggcaagaatcatc

SEQ ID NO: 973 - DNA, 21 bp, Homo sapiens
  source 1..21: mol_type = genomic DNA
caacactgctagaattcccaa

SEQ ID NO: 974 - DNA, 21 bp, Homo sapiens
  source 1..21: mol_type = genomic DNA
cctgagaagcacctgattgta

SEQ ID NO: 975 - DNA, 20 bp, Homo sapiens
  source 1..20: mol_type = genomic DNA
tgttgtcagaaatcccagga

SEQ ID NO: 976 - DNA, 21 bp, Homo sapiens
  source 1..21: mol_type = genomic DNA
aactggagccatataacgatg

SEQ ID NO: 977 - DNA, 21 bp, Homo sapiens
  source 1..21: mol_type = genomic DNA
gaaatggtgccctattgttga

SEQ ID NO: 978 - DNA, 22 bp, Homo sapiens
  source 1..22: mol_type = genomic DNA
tcttacatgcagtcatactcct

SEQ ID NO: 979 - DNA, 22 bp, Homo sapiens
  source 1..22: mol_type = genomic DNA
gtccctcagtaacaccatctta

SEQ ID NO: 980 - DNA, 21 bp, Homo sapiens
  source 1..21: mol_type = genomic DNA
gaagcaagaggatcaggcaat

SEQ ID NO: 981 - DNA, 21 bp, Homo sapiens
  source 1..21: mol_type = genomic DNA
agtgtttcagaggcttgaaag

SEQ ID NO: 982 - DNA, 21 bp, Homo sapiens
  source 1..21: mol_type = genomic DNA
atccggcatcctttaaactct

SEQ ID NO: 983 - DNA, 21 bp, Homo sapiens
  source 1..21: mol_type = genomic DNA
aggctaggaagaaatgggaaa

SEQ ID NO: 984 - DNA, 21 bp, Homo sapiens
  source 1..21: mol_type = genomic DNA
acacatatgctctgtctctca

SEQ ID NO: 985 - DNA, 21 bp, Homo sapiens
  source 1..21: mol_type = genomic DNA
agttagttatcacctcgtccc

SEQ ID NO: 986 - DNA, 22 bp, Homo sapiens
  source 1..22: mol_type = genomic DNA
tgtgtatttccctctagttgca

SEQ ID NO: 987 - DNA, 21 bp, Homo sapiens
  source 1..21: mol_type = genomic DNA
agcctctttctacatcgttcg

SEQ ID NO: 988 - DNA, 21 bp, Homo sapiens
  source 1..21: mol_type = genomic DNA
ttacctgtgcagaagagtgac

SEQ ID NO: 989 - DNA, 21 bp, Homo sapiens
  source 1..21: mol_type = genomic DNA
tcttgtgttctagcgtgtttg

SEQ ID NO: 990 - DNA, 21 bp, Homo sapiens
  source 1..21: mol_type = genomic DNA
tgtggttagtcagaaatgtgg

SEQ ID NO: 991 - DNA, 21 bp, Homo sapiens
  source 1..21: mol_type = genomic DNA
gggtcctgatgagtctttgtc

SEQ ID NO: 992 - DNA, 21 bp, Homo sapiens
  source 1..21: mol_type = genomic DNA
tggtgcctttgtttattcagc

SEQ ID NO: 993 - DNA, 21 bp, Homo sapiens
  source 1..21: mol_type = genomic DNA
tgttatgtgccagggtttaac

SEQ ID NO: 994 - DNA, 21 bp, Homo sapiens
  source 1..21: mol_type = genomic DNA
attggttccagatacagtcga

SEQ ID NO: 995 - DNA, 21 bp, Homo sapiens
  source 1..21: mol_type = genomic DNA
ggaaggaagtacagcatggat

SEQ ID NO: 996 - DNA, 21 bp, Homo sapiens
  source 1..21: mol_type = genomic DNA
ccttattgaagctgaccatgc

SEQ ID NO: 997 - DNA, 21 bp, Homo sapiens
  source 1..21: mol_type = genomic DNA
cagtgggaaatgtgcttacat

SEQ ID NO: 998 - DNA, 21 bp, Homo sapiens
  source 1..21: mol_type = genomic DNA
aaagggcctatattcaccaga

SEQ ID NO: 999 - DNA, 22 bp, Homo sapiens
  source 1..22: mol_type = genomic DNA
agagccatttaagactctctgt

SEQ ID NO: 1000 - DNA, 21 bp, Homo sapiens
  source 1..21: mol_type = genomic DNA
taccttgttctctgcctcaat

SEQ ID NO: 1001 - DNA, 21 bp, Homo sapiens
  source 1..21: mol_type = genomic DNA
tttagaaggatgtggacaggg

SEQ ID NO: 1002 - DNA, 20 bp, Homo sapiens
  source 1..20: mol_type = genomic DNA
agcaggacatggacttcaaa

SEQ ID NO: 1003 - DNA, 21 bp, Homo sapiens
  source 1..21: mol_type = genomic DNA
gcggctcttgtttctgaaatc

SEQ ID NO: 1004 - DNA, 21 bp, Homo sapiens
  source 1..21: mol_type = genomic DNA
acaggtaggagttcagagaca

SEQ ID NO: 1005 - DNA, 22 bp, Homo sapiens
  source 1..22: mol_type = genomic DNA
tttcctattctgctcttctgct

SEQ ID NO: 1006 - DNA, 21 bp, Homo sapiens
  source 1..21: mol_type = genomic DNA
aaatgctgctcagggttagag

SEQ ID NO: 1007 - DNA, 21 bp, Homo sapiens
  source 1..21: mol_type = genomic DNA
caactttactctgcacagctc

SEQ ID NO: 1008 - DNA, 22 bp, Homo sapiens
  source 1..22: mol_type = genomic DNA
cagtgccactacaaagaaatca

SEQ ID NO: 1009 - DNA, 21 bp, Homo sapiens
  source 1..21: mol_type = genomic DNA
agaagcagaggttggatatgg

SEQ ID NO: 1010 - DNA, 21 bp, Homo sapiens
  source 1..21: mol_type = genomic DNA
ccacaatcccatagtcaccat

SEQ ID NO: 1011 - DNA, 21 bp, Homo sapiens
  source 1..21: mol_type = genomic DNA
gctggttcttgttgctgataa

SEQ ID NO: 1012 - DNA, 21 bp, Homo sapiens
  source 1..21: mol_type = genomic DNA
tccctcacgacttatgtttga

SEQ ID NO: 1013 - DNA, 21 bp, Homo sapiens
  source 1..21: mol_type = genomic DNA
ctaccttctccagtgcactat

SEQ ID NO: 1014 - DNA, 21 bp, Homo sapiens
  source 1..21: mol_type = genomic DNA
ggacctctctttgaaatggac

SEQ ID NO: 1015 - DNA, 21 bp, Homo sapiens
  source 1..21: mol_type = genomic DNA
tgggttgtgtttctctgactt

SEQ ID NO: 1016 - DNA, 21 bp, Homo sapiens
  source 1..21: mol_type = genomic DNA
tacaagcctcctttaaccctt

SEQ ID NO: 1017 - DNA, 21 bp, Homo sapiens
  source 1..21: mol_type = genomic DNA
aaagggtttgatacagttggg

SEQ ID NO: 1018 - DNA, 22 bp, Homo sapiens
  source 1..22: mol_type = genomic DNA
aggtattggagagcaagaaaga

SEQ ID NO: 1019 - DNA, 21 bp, Homo sapiens
  source 1..21: mol_type = genomic DNA
gcaaactggagctaaagtcat

SEQ ID NO: 1020 - DNA, 21 bp, Homo sapiens
  source 1..21: mol_type = genomic DNA
ttggttgctagctctcaaatg

SEQ ID NO: 1021 - DNA, 21 bp, Homo sapiens
  source 1..21: mol_type = genomic DNA
ttcaatgcccttacttctcct

SEQ ID NO: 1022 - DNA, 20 bp, Homo sapiens
  source 1..20: mol_type = genomic DNA
gcttgaggcgcatatgattg

SEQ ID NO: 1023 - DNA, 20 bp, Homo sapiens
  source 1..20: mol_type = genomic DNA
catatggtgcttgttctggg

SEQ ID NO: 1024 - DNA, 21 bp, Homo sapiens
  source 1..21: mol_type = genomic DNA
caaactcaccacccttcattc

SEQ ID NO: 1025 - DNA, 21 bp, Homo sapiens
  source 1..21: mol_type = genomic DNA
ccttagccctgcaaataacac

SEQ ID NO: 1026 - DNA, 20 bp, Homo sapiens
  source 1..20: mol_type = genomic DNA
tcacagatacggacaagctc

SEQ ID NO: 1027 - DNA, 21 bp, Homo sapiens
  source 1..21: mol_type = genomic DNA
gccacaggtatcaatcacttc

SEQ ID NO: 1028 - DNA, 21 bp, Homo sapiens
  source 1..21: mol_type = genomic DNA
gcttctgtggcactaatcaag

SEQ ID NO: 1029 - DNA, 22 bp, Homo sapiens
  source 1..22: mol_type = genomic DNA
gccttattgacttactggactg

SEQ ID NO: 1030 - DNA, 21 bp, Homo sapiens
  source 1..21: mol_type = genomic DNA
gtcagggattagaggcagaac

SEQ ID NO: 1031 - DNA, 22 bp, Homo sapiens
  source 1..22: mol_type = genomic DNA
caatcacttggtcagatagtgt

SEQ ID NO: 1032 - DNA, 22 bp, Homo sapiens
  source 1..22: mol_type = genomic DNA
agtggagaggttgagtatagtg

SEQ ID NO: 1033 - DNA, 21 bp, Homo sapiens
  source 1..21: mol_type = genomic DNA
tgagaagggaggaagaatgtg

SEQ ID NO: 1034 - DNA, 21 bp, Homo sapiens
  source 1..21: mol_type = genomic DNA
aaggtcaaactctccattcca

SEQ ID NO: 1035 - DNA, 21 bp, Homo sapiens
  source 1..21: mol_type = genomic DNA
ggagatgtctttgccctgatt

SEQ ID NO: 1036 - DNA, 21 bp, Homo sapiens
  source 1..21: mol_type = genomic DNA
ggtcctcgtttgtccttaaga

SEQ ID NO: 1037 - DNA, 21 bp, Homo sapiens
  source 1..21: mol_type = genomic DNA
agtattgctttgagggctcta

SEQ ID NO: 1038 - DNA, 22 bp, Homo sapiens
  source 1..22: mol_type = genomic DNA
agctatcatgtaagtcactccc

SEQ ID NO: 1039 - DNA, 21 bp, Homo sapiens
  source 1..21: mol_type = genomic DNA
aggaaattcagtacctcagct

SEQ ID NO: 1040 - DNA, 22 bp, Homo sapiens
  source 1..22: mol_type = genomic DNA
caaccttctcattgttgaagct

SEQ ID NO: 1041 - DNA, 20 bp, Homo sapiens
  source 1..20: mol_type = genomic DNA
ggtgactttgctttcccaag

SEQ ID NO: 1042 - DNA, 20 bp, Homo sapiens
  source 1..20: mol_type = genomic DNA
gctgacaaacggagggagag

SEQ ID NO: 1043 - DNA, 21 bp, Homo sapiens
  source 1..21: mol_type = genomic DNA
tgttcttcatcaggcacaatg

SEQ ID NO: 1044 - DNA, 21 bp, Homo sapiens
  source 1..21: mol_type = genomic DNA
accatttgtgtgatccagaac

SEQ ID NO: 1045 - DNA, 20 bp, Homo sapiens
  source 1..20: mol_type = genomic DNA
cttgtcttgagtgcggtaca

SEQ ID NO: 1046 - DNA, 22 bp, Homo sapiens
  source 1..22: mol_type = genomic DNA
gcctctcagtttcctcttatag

SEQ ID NO: 1047 - DNA, 24 bp, Homo sapiens
  source 1..24: mol_type = genomic DNA
cctagatcagtgcagagaatttag

SEQ ID NO: 1048 - DNA, 22 bp, Homo sapiens
  source 1..22: mol_type = genomic DNA
ctttagtttggaggcctcattc

SEQ ID NO: 1049 - DNA, 21 bp, Homo sapiens
  source 1..21: mol_type = genomic DNA
ctgacatcgatggaattctgg

SEQ ID NO: 1050 - DNA, 21 bp, Homo sapiens
  source 1..21: mol_type = genomic DNA
acactgcacgaatggaagatc

SEQ ID NO: 1051 - DNA, 21 bp, Homo sapiens
  source 1..21: mol_type = genomic DNA
ataaacttggtgctcagtggt

SEQ ID NO: 1052 - DNA, 21 bp, Homo sapiens
  source 1..21: mol_type = genomic DNA
acaagcattacagaattcggc

SEQ ID NO: 1053 - DNA, 24 bp, Homo sapiens
  source 1..24: mol_type = genomic DNA
actgacagattctcacctatatca

SEQ ID NO: 1054 - DNA, 21 bp, Homo sapiens
  source 1..21: mol_type = genomic DNA
ggatcaaagccactctagact

SEQ ID NO: 1055 - DNA, 22 bp, Homo sapiens
  source 1..22: mol_type = genomic DNA
ttgagatggcatcaagttcaag

SEQ ID NO: 1056 - DNA, 22 bp, Homo sapiens
  source 1..22: mol_type = genomic DNA
actggattcatgcgttatcaag

SEQ ID NO: 1057 - DNA, 21 bp, Homo sapiens
  source 1..21: mol_type = genomic DNA
tattcttgtgtggaccctgtg

SEQ ID NO: 1058 - DNA, 22 bp, Homo sapiens
  source 1..22: mol_type = genomic DNA
tgatattgcatgaaagtccctg

SEQ ID NO: 1059 - DNA, 20 bp, Homo sapiens
  source 1..20: mol_type = genomic DNA
tcacacatgaggagtagaca

SEQ ID NO: 1060 - DNA, 20 bp, Homo sapiens
  source 1..20: mol_type = genomic DNA
cacagcaggagacatgagaa

SEQ ID NO: 1061 - DNA, 20 bp, Homo sapiens
  source 1..20: mol_type = genomic DNA
tttcctcctggcttgatcac

SEQ ID NO: 1062 - DNA, 20 bp, Homo sapiens
  source 1..20: mol_type = genomic DNA
caaaggagagaagtgaccca

SEQ ID NO: 1063 - DNA, 20 bp, Homo sapiens
  source 1..20: mol_type = genomic DNA
ctacgagtgaaacagagtgc

SEQ ID NO: 1064 - DNA, 20 bp, Homo sapiens
  source 1..20: mol_type = genomic DNA
agactaaaagcctccaagcc

SEQ ID NO: 1065 - DNA, 20 bp, Homo sapiens
  source 1..20: mol_type = genomic DNA
tagaatatgtcacccagccc

SEQ ID NO: 1066 - DNA, 20 bp, Homo sapiens
  source 1..20: mol_type = genomic DNA
acagaatcatcccatagcca

SEQ ID NO: 1067 - DNA, 21 bp, Homo sapiens
  source 1..21: mol_type = genomic DNA
cgccattctgtgcttaatttg

SEQ ID NO: 1068 - DNA, 21 bp, Homo sapiens
  source 1..21: mol_type = genomic DNA
gtgaagcaagagaaagcaaga

SEQ ID NO: 1069 - DNA, 20 bp, Homo sapiens
  source 1..20: mol_type = genomic DNA
tgattcggctgcaggttatt

SEQ ID NO: 1070 - DNA, 20 bp, Homo sapiens
  source 1..20: mol_type = genomic DNA
ctggcttcaaatgcatctga

SEQ ID NO: 1071 - DNA, 20 bp, Homo sapiens
  source 1..20: mol_type = genomic DNA
actgggaaattggaattcgc

SEQ ID NO: 1072 - DNA, 20 bp, Homo sapiens
  source 1..20: mol_type = genomic DNA
ggtaaaactgcctggaaact

SEQ ID NO: 1073 - DNA, 20 bp, Homo sapiens
  source 1..20: mol_type = genomic DNA
agaccacgggctctatctat

SEQ ID NO: 1074 - DNA, 22 bp, Homo sapiens
  source 1..22: mol_type = genomic DNA
catcttgcttattggcttacga

SEQ ID NO: 1075 - DNA, 20 bp, Homo sapiens
  source 1..20: mol_type = genomic DNA
gaggtagaggcagtgtcttg

SEQ ID NO: 1076 - DNA, 20 bp, Homo sapiens
  source 1..20: mol_type = genomic DNA
tagtccttgaactccctggt

SEQ ID NO: 1077 - DNA, 20 bp, Homo sapiens
  source 1..20: mol_type = genomic DNA
ccagcttagcgtctgttttt

SEQ ID NO: 1078 - DNA, 21 bp, Homo sapiens
  source 1..21: mol_type = genomic DNA
gaccacaactatcaagagcac

SEQ ID NO: 1079 - DNA, 20 bp, Homo sapiens
  source 1..20: mol_type = genomic DNA
ccaaagaaaggttgaagccc

SEQ ID NO: 1080 - DNA, 21 bp, Homo sapiens
  source 1..21: mol_type = genomic DNA
aataatgtgcactgtgatggc

SEQ ID NO: 1081 - DNA, 20 bp, Homo sapiens
  source 1..20: mol_type = genomic DNA
tttaagggtctgatggttgc

SEQ ID NO: 1082 - DNA, 20 bp, Homo sapiens
  source 1..20: mol_type = genomic DNA
gaaaatgcccatcgtctcaa

SEQ ID NO: 1083 - DNA, 20 bp, Homo sapiens
  source 1..20: mol_type = genomic DNA
attccttgtctttccccctc

SEQ ID NO: 1084 - DNA, 22 bp, Homo sapiens
  source 1..22: mol_type = genomic DNA
tcatttctctagcccaaagatg

SEQ ID NO: 1085 - DNA, 20 bp, Homo sapiens
  source 1..20: mol_type = genomic DNA
ttggtttgttgacttcagcc

SEQ ID NO: 1086 - DNA, 20 bp, Homo sapiens
  source 1..20: mol_type = genomic DNA
gctcagtgacagttgggatt

SEQ ID NO: 1087 - DNA, 22 bp, Homo sapiens
  source 1..22: mol_type = genomic DNA
gtcttgtctctcttcttccact

SEQ ID NO: 1088 - DNA, 20 bp, Homo sapiens
  source 1..20: mol_type = genomic DNA
tttagagcaggtggaaacga

SEQ ID NO: 1089 - DNA, 21 bp, Homo sapiens
  source 1..21: mol_type = genomic DNA
cttgggtttttatcggttgct

SEQ ID NO: 1090 - DNA, 20 bp, Homo sapiens
  source 1..20: mol_type = genomic DNA
gttgcctggattgctctaaa

SEQ ID NO: 1091 - DNA, 20 bp, Homo sapiens
  source 1..20: mol_type = genomic DNA
aaatcacgacgtaggaaacc

SEQ ID NO: 1092 - DNA, 20 bp, Homo sapiens
  source 1..20: mol_type = genomic DNA
tcaccttggagcaggtcata

SEQ ID NO: 1093 - DNA, 20 bp, Homo sapiens
  source 1..20: mol_type = genomic DNA
cgaagaaggtctgggagatg

SEQ ID NO: 1094 - DNA, 21 bp, Homo sapiens
  source 1..21: mol_type = genomic DNA
caccattgtttcatcaggact

SEQ ID NO: 1095 - DNA, 21 bp, Homo sapiens
  source 1..21: mol_type = genomic DNA
ttgcatcatcagctcacatac

SEQ ID NO: 1096 - DNA, 20 bp, Homo sapiens
  source 1..20: mol_type = genomic DNA
agacctggaaaatgatgggt

SEQ ID NO: 1097 - DNA, 20 bp, Homo sapiens
  source 1..20: mol_type = genomic DNA
cctggaagtgtgtaacaagc

SEQ ID NO: 1098 - DNA, 21 bp, Homo sapiens
  source 1..21: mol_type = genomic DNA
ctccctagcaaaaacttctca

SEQ ID NO: 1099 - DNA, 20 bp, Homo sapiens
  source 1..20: mol_type = genomic DNA
tgccttattcactgtgcaac

SEQ ID NO: 1100 - DNA, 20 bp, Homo sapiens
  source 1..20: mol_type = genomic DNA
tgatggcctagtgagtttcc

SEQ ID NO: 1101 - DNA, 20 bp, Homo sapiens
  source 1..20: mol_type = genomic DNA
tgcaatgtaacaaaagcgtg

SEQ ID NO: 1102 - DNA, 20 bp, Homo sapiens
  source 1..20: mol_type = genomic DNA
gccacatttgctttcacaca

SEQ ID NO: 1103 - DNA, 19 bp, Homo sapiens
  source 1..19: mol_type = genomic DNA
acgtcattgggttcatggc

SEQ ID NO: 1104 - DNA, 20 bp, Homo sapiens
  source 1..20: mol_type = genomic DNA
attttacccccttaggcacc

SEQ ID NO: 1105 - DNA, 20 bp, Homo sapiens
  source 1..20: mol_type = genomic DNA
tcttctacacagcccttcag

SEQ ID NO: 1106 - DNA, 20 bp, Homo sapiens
  source 1..20: mol_type = genomic DNA
attgggatcgtcagcatcaa

SEQ ID NO: 1107 - DNA, 20 bp, Homo sapiens
  source 1..20: mol_type = genomic DNA
tgattgtcttgtccactggt

SEQ ID NO: 1108 - DNA, 20 bp, Homo sapiens
  source 1..20: mol_type = genomic DNA
acatcacacttcatgccctt

SEQ ID NO: 1109 - DNA, 20 bp, Homo sapiens
  source 1..20: mol_type = genomic DNA
atgaaggcattaggagggag

SEQ ID NO: 1110 - DNA, 20 bp, Homo sapiens
  source 1..20: mol_type = genomic DNA
aaagtggagaagtggcagat

SEQ ID NO: 1111 - DNA, 22 bp, Homo sapiens
  source 1..22: mol_type = genomic DNA
ccttaggattctgagaggtgag

SEQ ID NO: 1112 - DNA, 20 bp, Homo sapiens
  source 1..20: mol_type = genomic DNA
agggcttctgattgatttgc

SEQ ID NO: 1113 - DNA, 20 bp, Homo sapiens
  source 1..20: mol_type = genomic DNA
cagggtagtcgggatttctc

SEQ ID NO: 1114 - DNA, 20 bp, Homo sapiens
  source 1..20: mol_type = genomic DNA
cccggtaatgatctacagca

SEQ ID NO: 1115 - DNA, 19 bp, Homo sapiens
  source 1..19: mol_type = genomic DNA
aacggcacttggttcacta

SEQ ID NO: 1116 - DNA, 20 bp, Homo sapiens
  source 1..20: mol_type = genomic DNA
actctgaactcctcctcctg

SEQ ID NO: 1117 - DNA, 20 bp, Homo sapiens
  source 1..20: mol_type = genomic DNA
tttgctcacacacaagacac

SEQ ID NO: 1118 - DNA, 20 bp, Homo sapiens
  source 1..20: mol_type = genomic DNA
acgactgcatccttttcatg

SEQ ID NO: 1119 - DNA, 22 bp, Homo sapiens
  source 1..22: mol_type = genomic DNA
ccatcatagcctacaaataccc

SEQ ID NO: 1120 - DNA, 22 bp, Homo sapiens
  source 1..22: mol_type = genomic DNA
agagagttgaaaatatccccca

SEQ ID NO: 1121 - DNA, 20 bp, Homo sapiens
  source 1..20: mol_type = genomic DNA
actttcttgaacaccccagt

SEQ ID NO: 1122 - DNA, 20 bp, Homo sapiens
  source 1..20: mol_type = genomic DNA
tgcctgtgtcctacttttcc

SEQ ID NO: 1123 - DNA, 20 bp, Homo sapiens
  source 1..20: mol_type = genomic DNA
tgactgcccaagaatgtaca

SEQ ID NO: 1124 - DNA, 20 bp, Homo sapiens
  source 1..20: mol_type = genomic DNA
ccgaacacgctgtatgtatt

SEQ ID NO: 1125 - DNA, 20 bp, Homo sapiens
  source 1..20: mol_type = genomic DNA
ggaagggaattgaagcacag

SEQ ID NO: 1126 - DNA, 20 bp, Homo sapiens
  source 1..20: mol_type = genomic DNA
tcatcctatccaccaacctg

SEQ ID NO: 1127 - DNA, 20 bp, Homo sapiens
  source 1..20: mol_type = genomic DNA
aatgaactggccctgactta

SEQ ID NO: 1128 - DNA, 20 bp, Homo sapiens
  source 1..20: mol_type = genomic DNA
taagataccataccgcagct

SEQ ID NO: 1129 - DNA, 21 bp, Homo sapiens
  source 1..21: mol_type = genomic DNA
tcagcgttcatggtaccaata

SEQ ID NO: 1130 - DNA, 21 bp, Homo sapiens
  source 1..21: mol_type = genomic DNA
gtttcccaaccaacaaacaag

SEQ ID NO: 1131 - DNA, 20 bp, Homo sapiens
  source 1..20: mol_type = genomic DNA
tctatcgggatggagagtga

SEQ ID NO: 1132 - DNA, 20 bp, Homo sapiens
  source 1..20: mol_type = genomic DNA
gttcagacaggtggactagg

SEQ ID NO: 1133 - DNA, 20 bp, Homo sapiens
  source 1..20: mol_type = genomic DNA
aagcaacctgggaaattgtg

SEQ ID NO: 1134 - DNA, 20 bp, Homo sapiens
  source 1..20: mol_type = genomic DNA
gggttaaggttgctgggtta

SEQ ID NO: 1135 - DNA, 21 bp, Homo sapiens
  source 1..21: mol_type = genomic DNA
gtgaaatgtggttgtagtgca

SEQ ID NO: 1136 - DNA, 20 bp, Homo sapiens
  source 1..20: mol_type = genomic DNA
gtgactgccttgcttcattt

SEQ ID NO: 1137 - DNA, 20 bp, Homo sapiens
  source 1..20: mol_type = genomic DNA
cagttctggagccttctact

SEQ ID NO: 1138 - DNA, 20 bp, Homo sapiens
  source 1..20: mol_type = genomic DNA
ttagggcaggatgtacagaa

SEQ ID NO: 1139 - DNA, 20 bp, Homo sapiens
  source 1..20: mol_type = genomic DNA
gctggtgaccttcattcaag

SEQ ID NO: 1140 - DNA, 19 bp, Homo sapiens
  source 1..19: mol_type = genomic DNA
taaaaccatgttcggggca

SEQ ID NO: 1141 - DNA, 21 bp, Homo sapiens
  source 1..21: mol_type = genomic DNA
ctacctgtccgtttcccttac

SEQ ID NO: 1142 - DNA, 21 bp, Homo sapiens
  source 1..21: mol_type = genomic DNA
gacaaagatgactggaggtga

SEQ ID NO: 1143 - DNA, 21 bp, Homo sapiens
  source 1..21: mol_type = genomic DNA
gggtggatggtgagatatgtg

SEQ ID NO: 1144 - DNA, 21 bp, Homo sapiens
  source 1..21: mol_type = genomic DNA
cttcaaacctgatccatgtgc

SEQ ID NO: 1145 - DNA, 21 bp, Homo sapiens
  source 1..21: mol_type = genomic DNA
gcagaaacagcatgaatctcc

SEQ ID NO: 1146 - DNA, 21 bp, Homo sapiens
  source 1..21: mol_type = genomic DNA
tgacttcaaacatcccatcca

SEQ ID NO: 1147 - DNA, 21 bp, Homo sapiens
  source 1..21: mol_type = genomic DNA
gtgggatgagttctagaggaa

SEQ ID NO: 1148 - DNA, 21 bp, Homo sapiens
  source 1..21: mol_type = genomic DNA
agtcacacacatacacacagt

SEQ ID NO: 1149 - DNA, 21 bp, Homo sapiens
  source 1..21: mol_type = genomic DNA
acgacttccctgtgtaactta

SEQ ID NO: 1150 - DNA, 21 bp, Homo sapiens
  source 1..21: mol_type = genomic DNA
ccttctcttgtctctagtgcc

SEQ ID NO: 1151 - DNA, 21 bp, Homo sapiens
  source 1..21: mol_type = genomic DNA
ctggaaatacacacacacctg

SEQ ID NO: 1152 - DNA, 21 bp, Homo sapiens
  source 1..21: mol_type = genomic DNA
atttgtaaaccacccacttcg

SEQ ID NO: 1153 - DNA, 21 bp, Homo sapiens
  source 1..21: mol_type = genomic DNA
tcactgtgctgacaaatccta

SEQ ID NO: 1154 - DNA, 21 bp, Homo sapiens
  source 1..21: mol_type = genomic DNA
cccatcatcatcccttcagac

SEQ ID NO: 1155 - DNA, 21 bp, Homo sapiens
  source 1..21: mol_type = genomic DNA
tcatcactttatcctcccagt

SEQ ID NO: 1156 - DNA, 21 bp, Homo sapiens
  source 1..21: mol_type = genomic DNA
atgggcacaggtaaagagttt

SEQ ID NO: 1157 - DNA, 21 bp, Homo sapiens
  source 1..21: mol_type = genomic DNA
tttgtaagctgagtgtgaggt

SEQ ID NO: 1158 - DNA, 21 bp, Homo sapiens
  source 1..21: mol_type = genomic DNA
ttactgtttgaatgccagctc

SEQ ID NO: 1159 - DNA, 21 bp, Homo sapiens
  source 1..21: mol_type = genomic DNA
tcccttctcccatcacaattc

SEQ ID NO: 1160 - DNA, 21 bp, Homo sapiens
  source 1..21: mol_type = genomic DNA
gaagactgcatgtgtgtccta

SEQ ID NO: 1161 - DNA, 21 bp, Homo sapiens
  source 1..21: mol_type = genomic DNA
ttctcactctcaactgaacca

SEQ ID NO: 1162 - DNA, 22 bp, Homo sapiens
  source 1..22: mol_type = genomic DNA
tcagggagcttctaattaagga

SEQ ID NO: 1163 - DNA, 21 bp, Homo sapiens
  source 1..21: mol_type = genomic DNA
aagatgatcccaggcttaagg

SEQ ID NO: 1164 - DNA, 21 bp, Homo sapiens
  source 1..21: mol_type = genomic DNA
gttgaggtttgctgatcttgg

SEQ ID NO: 1165 - DNA, 21 bp, Homo sapiens
  source 1..21: mol_type = genomic DNA
caaagatagattcgcacacca

SEQ ID NO: 1166 - DNA, 21 bp, Homo sapiens
  source 1..21: mol_type = genomic DNA
gagctggacaaattaaatggc

SEQ ID NO: 1167 - DNA, 20 bp, Homo sapiens
  source 1..20: mol_type = genomic DNA
ccagtgcatttggtttgaca

SEQ ID NO: 1168 - DNA, 21 bp, Homo sapiens
  source 1..21: mol_type = genomic DNA
tatgtgaatcctctgtgtggc

SEQ ID NO: 1169 - DNA, 21 bp, Homo sapiens
  source 1..21: mol_type = genomic DNA
agcttctctctcattctgctt

SEQ ID NO: 1170 - DNA, 21 bp, Homo sapiens
  source 1..21: mol_type = genomic DNA
gactcccgatttcatttgctg

SEQ ID NO: 1171 - DNA, 22 bp, Homo sapiens
  source 1..22: mol_type = genomic DNA
tcccaatcgttgtgaaacatac

SEQ ID NO: 1172 - DNA, 21 bp, Homo sapiens
  source 1..21: mol_type = genomic DNA
tctttacaggaagttgggacc

SEQ ID NO: 1173 - DNA, 21 bp, Homo sapiens
  source 1..21: mol_type = genomic DNA
taagttcagatcagggagcag

SEQ ID NO: 1174 - DNA, 22 bp, Homo sapiens
  source 1..22: mol_type = genomic DNA
gttgaaagtcttacagaacgct

SEQ ID NO: 1175 - DNA, 21 bp, Homo sapiens
  source 1..21: mol_type = genomic DNA
caacataggcacattgtcctc

SEQ ID NO: 1176 - DNA, 21 bp, Homo sapiens
  source 1..21: mol_type = genomic DNA
gtcaggcctcataactctctt

SEQ ID NO: 1177 - DNA, 21 bp, Homo sapiens
  source 1..21: mol_type = genomic DNA
gttgtgtggctttccttatca

SEQ ID NO: 1178 - DNA, 21 bp, Homo sapiens
  source 1..21: mol_type = genomic DNA
cctgcagctctgtgtaaattt

SEQ ID NO: 1179 - DNA, 21 bp, Homo sapiens
  source 1..21: mol_type = genomic DNA
ctttggccagttctttctctc

SEQ ID NO: 1180 - DNA, 20 bp, Homo sapiens
  source 1..20: mol_type = genomic DNA
gtggcccagcattatttgtt

SEQ ID NO: 1181 - DNA, 21 bp, Homo sapiens
  source 1..21: mol_type = genomic DNA
tcttggtgtgacttgctaaca

SEQ ID NO: 1182 - DNA, 21 bp, Homo sapiens
  source 1..21: mol_type = genomic DNA
tttctggctgagataagaccc

SEQ ID NO: 1183 - DNA, 21 bp, Homo sapiens
  source 1..21: mol_type = genomic DNA
acaattccgtggtatacagct

SEQ ID NO: 1184 - DNA, 21 bp, Homo sapiens
  source 1..21: mol_type = genomic DNA
tgattgtgccctaaccaaact

SEQ ID NO: 1185 - DNA, 21 bp, Homo sapiens
  source 1..21: mol_type = genomic DNA
tgtcgtatcctgctgtttaga

SEQ ID NO: 1186 - DNA, 21 bp, Homo sapiens
  source 1..21: mol_type = genomic DNA
tcaggagtaaagtcaggacct

SEQ ID NO: 1187 - DNA, 21 bp, Homo sapiens
  source 1..21: mol_type = genomic DNA
tgagctgatttactgtgacac

SEQ ID NO: 1188 - DNA, 21 bp, Homo sapiens
  source 1..21: mol_type = genomic DNA
tagcaccttgacttcaggatt

SEQ ID NO: 1189 - DNA, 21 bp, Homo sapiens
  source 1..21: mol_type = genomic DNA
tgaggttggaaagggtcaatt

SEQ ID NO: 1190 - DNA, 21 bp, Homo sapiens
  source 1..21: mol_type = genomic DNA
cagctttccttcctcttctct

SEQ ID NO: 1191 - DNA, 21 bp, Homo sapiens
  source 1..21: mol_type = genomic DNA
acagtgagaggaaagaacagc

SEQ ID NO: 1192 - DNA, 21 bp, Homo sapiens
  source 1..21: mol_type = genomic DNA
ggaaataaattgtgagctggc

SEQ ID NO: 1193 - DNA, 21 bp, Homo sapiens
  source 1..21: mol_type = genomic DNA
agacagcccttcaatccatac

SEQ ID NO: 1194 - DNA, 21 bp, Homo sapiens
  source 1..21: mol_type = genomic DNA
cctacatcccttcctcctttc

SEQ ID NO: 1195 - DNA, 21 bp, Homo sapiens
  source 1..21: mol_type = genomic DNA
tcacccatcttccaattagct

SEQ ID NO: 1196 - DNA, 22 bp, Homo sapiens
  source 1..22: mol_type = genomic DNA
tttctaagcacaaactgacacc

SEQ ID NO: 1197 - DNA, 21 bp, Homo sapiens
  source 1..21: mol_type = genomic DNA
gatgtttgcactggagggata

SEQ ID NO: 1198 - DNA, 21 bp, Homo sapiens
  source 1..21: mol_type = genomic DNA
gaagactaaatgttggccgaa

SEQ ID NO: 1199 - DNA, 21 bp, Homo sapiens
  source 1..21: mol_type = genomic DNA
gtagagagagggaggatcaca

SEQ ID NO: 1200 - DNA, 21 bp, Homo sapiens
  source 1..21: mol_type = genomic DNA
cttgccatgaagtttgaccag

SEQ ID NO: 1201 - DNA, 21 bp, Homo sapiens
  source 1..21: mol_type = genomic DNA
aggatgagcatttgtaacctg

SEQ ID NO: 1202 - DNA, 21 bp, Homo sapiens
  source 1..21: mol_type = genomic DNA
tgtcgctttcaaattacccac

SEQ ID NO: 1203 - DNA, 21 bp, Homo sapiens
  source 1..21: mol_type = genomic DNA
catacaagtgctctgttaggc

SEQ ID NO: 1204 - DNA, 21 bp, Homo sapiens
  source 1..21: mol_type = genomic DNA
aggacttggaaccagaaagac

SEQ ID NO: 1205 - DNA, 21 bp, Homo sapiens
  source 1..21: mol_type = genomic DNA
aaagagggctgatatcgtctg

SEQ ID NO: 1206 - DNA, 21 bp, Homo sapiens
  source 1..21: mol_type = genomic DNA
ctcactgcaaactatggaacc

SEQ ID NO: 1207 - DNA, 21 bp, Homo sapiens
  source 1..21: mol_type = genomic DNA
tattctgcccatcttcttcct

SEQ ID NO: 1208 - DNA, 20 bp, Homo sapiens
  source 1..20: mol_type = genomic DNA
ggagacagcccaaacataga

SEQ ID NO: 1209 - DNA, 21 bp, Homo sapiens
  source 1..21: mol_type = genomic DNA
agcaatggtgaagttctggat

SEQ ID NO: 1210 - DNA, 21 bp, Homo sapiens
  source 1..21: mol_type = genomic DNA
ctggtcagtgagagaagggaa

SEQ ID NO: 1211 - DNA, 20 bp, Homo sapiens
  source 1..20: mol_type = genomic DNA
tttctccactggcatgaact

SEQ ID NO: 1212 - DNA, 21 bp, Homo sapiens
  source 1..21: mol_type = genomic DNA
catgatcacaattccaagcca

SEQ ID NO: 1213 - DNA, 21 bp, Homo sapiens
  source 1..21: mol_type = genomic DNA
acccagtcaagttacagtctt

SEQ ID NO: 1214 - DNA, 22 bp, Homo sapiens
  source 1..22: mol_type = genomic DNA
tgtaaagcatatcaagggaacg

SEQ ID NO: 1215 - DNA, 21 bp, Homo sapiens
  source 1..21: mol_type = genomic DNA
tgcagagatatgttcccgtat

SEQ ID NO: 1216 - DNA, 21 bp, Homo sapiens
  source 1..21: mol_type = genomic DNA
agaagacagtacaaggaaggc

SEQ ID NO: 1217 - DNA, 21 bp, Homo sapiens
  source 1..21: mol_type = genomic DNA
tgtttgccatttgttctcctc

SEQ ID NO: 1218 - DNA, 21 bp, Homo sapiens
  source 1..21: mol_type = genomic DNA
ttgaaggcaagagaagtttgg

SEQ ID NO: 1219 - DNA, 21 bp, Homo sapiens
  source 1..21: mol_type = genomic DNA
gccaaggaaatgtagggaaag

SEQ ID NO: 1220 - DNA, 21 bp, Homo sapiens
  source 1..21: mol_type = genomic DNA
aaccttcacacctagagacag

SEQ ID NO: 1221 - DNA, 21 bp, Homo sapiens
  source 1..21: mol_type = genomic DNA
gcataacagggaaagtcacct

SEQ ID NO: 1222 - DNA, 21 bp, Homo sapiens
  source 1..21: mol_type = genomic DNA
aggatgttagtggtttgggta

SEQ ID NO: 1223 - DNA, 20 bp, Homo sapiens
  source 1..20: mol_type = genomic DNA
tctgacactgaccttcaact

SEQ ID NO: 1224 - DNA, 20 bp, Homo sapiens
  source 1..20: mol_type = genomic DNA
gaaacattgctttccctcca

SEQ ID NO: 1225 - DNA, 20 bp, Homo sapiens
  source 1..20: mol_type = genomic DNA
ttccacacatctcttctccg

SEQ ID NO: 1226 - DNA, 20 bp, Homo sapiens
  source 1..20: mol_type = genomic DNA
gggagccttgaaaacctgaa

SEQ ID NO: 1227 - DNA, 19 bp, Homo sapiens
  source 1..19: mol_type = genomic DNA
attggtagcgttgtcagca

SEQ ID NO: 1228 - DNA, 20 bp, Homo sapiens
  source 1..20: mol_type = genomic DNA
ttcctgcatcttgtagaccc

SEQ ID NO: 1229 - DNA, 20 bp, Homo sapiens
  source 1..20: mol_type = genomic DNA
gggctaatgttttgcttcca

SEQ ID NO: 1230 - DNA, 20 bp, Homo sapiens
  source 1..20: mol_type = genomic DNA
tgttgattagagcttccccc

SEQ ID NO: 1231 - DNA, 19 bp, Homo sapiens
  source 1..19: mol_type = genomic DNA
agaggttttcttccccgtg

SEQ ID NO: 1232 - DNA, 20 bp, Homo sapiens
  source 1..20: mol_type = genomic DNA
tagtgccctctattgtgcct

SEQ ID NO: 1233 - DNA, 20 bp, Homo sapiens
  source 1..20: mol_type = genomic DNA
actgctggactttgaaatgc

SEQ ID NO: 1234 - DNA, 20 bp, Homo sapiens
  source 1..20: mol_type = genomic DNA
caaacagtgagatgtggctg

SEQ ID NO: 1235 - DNA, 21 bp, Homo sapiens
  source 1..21: mol_type = genomic DNA
ttgcttcctgaaaactggttc

SEQ ID NO: 1236 - DNA, 20 bp, Homo sapiens
  source 1..20: mol_type = genomic DNA
attccaatcacgtctctgca

SEQ ID NO: 1237 - DNA, 20 bp, Homo sapiens
  source 1..20: mol_type = genomic DNA
acaatctcacagcctggaaa

SEQ ID NO: 1238 - DNA, 20 bp, Homo sapiens
  source 1..20: mol_type = genomic DNA
tcagatgggtgaggttcttg

SEQ ID NO: 1239 - DNA, 20 bp, Homo sapiens
  source 1..20: mol_type = genomic DNA
ctgctccttccctccaatta

SEQ ID NO: 1240 - DNA, 20 bp, Homo sapiens
  source 1..20: mol_type = genomic DNA
aaatgccagtcctgtaaagg

SEQ ID NO: 1241 - DNA, 20 bp, Homo sapiens
  source 1..20: mol_type = genomic DNA
tgtcccattgcttaggaagt

SEQ ID NO: 1242 - DNA, 20 bp, Homo sapiens
  source 1..20: mol_type = genomic DNA
tgtgtgatccagagacccta

SEQ ID NO: 1243 - DNA, 20 bp, Homo sapiens
  source 1..20: mol_type = genomic DNA
accaatgtagacttagcggg

SEQ ID NO: 1244 - DNA, 20 bp, Homo sapiens
  source 1..20: mol_type = genomic DNA
actctcatattgccccactt

SEQ ID NO: 1245 - DNA, 20 bp, Homo sapiens
  source 1..20: mol_type = genomic DNA
ccagggattgatgtactggt

SEQ ID NO: 1246 - DNA, 20 bp, Homo sapiens
  source 1..20: mol_type = genomic DNA
aattctggtctatctggcgt

SEQ ID NO: 1247 - DNA, 20 bp, Homo sapiens
  source 1..20: mol_type = genomic DNA
gccagcccttttcacatatt

SEQ ID NO: 1248 - DNA, 20 bp, Homo sapiens
  source 1..20: mol_type = genomic DNA
aactacaccatcccctgttt

SEQ ID NO: 1249 - DNA, 20 bp, Homo sapiens
  source 1..20: mol_type = genomic DNA
ccatttcaaacatgctggtc

SEQ ID NO: 1250 - DNA, 22 bp, Homo sapiens
  source 1..22: mol_type = genomic DNA
agattataagaaggcagggaac

SEQ ID NO: 1251 - DNA, 22 bp, Homo sapiens
  source 1..22: mol_type = genomic DNA
gtagagggcttaaaacatgtcc

SEQ ID NO: 1252 - DNA, 21 bp, Homo sapiens
  source 1..21: mol_type = genomic DNA
acaagaacacagtcgttaagc

SEQ ID NO: 1253 - DNA, 20 bp, Homo sapiens
  source 1..20: mol_type = genomic DNA
tctctccttcactcccttca

SEQ ID NO: 1254 - DNA, 20 bp, Homo sapiens
  source 1..20: mol_type = genomic DNA
tgtccacccctctttgattg

SEQ ID NO: 1255 - DNA, 20 bp, Homo sapiens
  source 1..20: mol_type = genomic DNA
tttagcttctcctgcctttg

SEQ ID NO: 1256 - DNA, 20 bp, Homo sapiens
  source 1..20: mol_type = genomic DNA
agaagcaattcaccaggtca

SEQ ID NO: 1257 - DNA, 20 bp, Homo sapiens
  source 1..20: mol_type = genomic DNA
tggagtcagaagtgtgtgtt

SEQ ID NO: 1258 - DNA, 20 bp, Homo sapiens
  source 1..20: mol_type = genomic DNA
tctggtgtcaaagcttaggg

SEQ ID NO: 1259 - DNA, 20 bp, Homo sapiens
  source 1..20: mol_type = genomic DNA
tgccgatgatgtgtgttttg

SEQ ID NO: 1260 - DNA, 20 bp, Homo sapiens
  source 1..20: mol_type = genomic DNA
tgtcccttcctaatcccaaa

SEQ ID NO: 1261 - DNA, 20 bp, Homo sapiens
  source 1..20: mol_type = genomic DNA
aggatgtttaagttgcagca

SEQ ID NO: 1262 - DNA, 20 bp, Homo sapiens
  source 1..20: mol_type = genomic DNA
tatgcagttttaccccctcc

SEQ ID NO: 1263 - DNA, 20 bp, Homo sapiens
  source 1..20: mol_type = genomic DNA
ttctgtgtggtctcctcttg

SEQ ID NO: 1264 - DNA, 20 bp, Homo sapiens
  source 1..20: mol_type = genomic DNA
atggagggacaagtgagaca

SEQ ID NO: 1265 - DNA, 20 bp, Homo sapiens
  source 1..20: mol_type = genomic DNA
ggggaacatggagctgtaaa

SEQ ID NO: 1266 - DNA, 20 bp, Homo sapiens
  source 1..20: mol_type = genomic DNA
ggaccccctaccacatttac

SEQ ID NO: 1267 - DNA, 21 bp, Homo sapiens
  source 1..21: mol_type = genomic DNA
agatggagaaatgtgcagaga

SEQ ID NO: 1268 - DNA, 19 bp, Homo sapiens
  source 1..19: mol_type = genomic DNA
atgactgcatccaagagca

SEQ ID NO: 1269 - DNA, 20 bp, Homo sapiens
  source 1..20: mol_type = genomic DNA
cagaatttccaggcagttgt

SEQ ID NO: 1270 - DNA, 21 bp, Homo sapiens
  source 1..21: mol_type = genomic DNA
gaatccagaagctcagtcctt

SEQ ID NO: 1271 - DNA, 20 bp, Homo sapiens
  source 1..20: mol_type = genomic DNA
agccctggaatcttgacatt

SEQ ID NO: 1272 - DNA, 19 bp, Homo sapiens
  source 1..19: mol_type = genomic DNA
gtgcattatacggatggcc

SEQ ID NO: 1273 - DNA, 20 bp, Homo sapiens
  source 1..20: mol_type = genomic DNA
ggtagagggtcctgtgattc

SEQ ID NO: 1274 - DNA, 20 bp, Homo sapiens
  source 1..20: mol_type = genomic DNA
gtaactgctagccactgagt

SEQ ID NO: 1275 - DNA, 20 bp, Homo sapiens
  source 1..20: mol_type = genomic DNA
gcctttttgggaatcctagt

SEQ ID NO: 1276 - DNA, 20 bp, Homo sapiens
  source 1..20: mol_type = genomic DNA
aagggtggaagcacattgac

SEQ ID NO: 1277 - DNA, 20 bp, Homo sapiens
  source 1..20: mol_type = genomic DNA
atagaggaacaagctgcaca

SEQ ID NO: 1278 - DNA, 20 bp, Homo sapiens
  source 1..20: mol_type = genomic DNA
ctcgtcccttgcacatctta

SEQ ID NO: 1279 - DNA, 20 bp, Homo sapiens
  source 1..20: mol_type = genomic DNA
aggtggggaagaacaaaaca

SEQ ID NO: 1280 - DNA, 20 bp, Homo sapiens
  source 1..20: mol_type = genomic DNA
gagagtaggtgcagggaaac

SEQ ID NO: 1281 - DNA, 20 bp, Homo sapiens
  source 1..20: mol_type = genomic DNA
atcccgcattcttaaccaca

SEQ ID NO: 1282 - DNA, 21 bp, Homo sapiens
  source 1..21: mol_type = genomic DNA
gactaagcaaaagcatctccc

SEQ ID NO: 1283 - DNA, 20 bp, Homo sapiens
  source 1..20: mol_type = genomic DNA
ttcttacaggctcagggtat

SEQ ID NO: 1284 - DNA, 21 bp, Homo sapiens
  source 1..21: mol_type = genomic DNA
cccatagcttaacccctacaa

SEQ ID NO: 1285 - DNA, 22 bp, Homo sapiens
  source 1..22: mol_type = genomic DNA
tcttcatcttactgtctagcac

SEQ ID NO: 1286 - DNA, 21 bp, Homo sapiens
  source 1..21: mol_type = genomic DNA
tcataccctatccctgtgatc

SEQ ID NO: 1287 - DNA, 21 bp, Homo sapiens
  source 1..21: mol_type = genomic DNA
tcttgcccttgatttgtttcc

SEQ ID NO: 1288 - DNA, 21 bp, Homo sapiens
  source 1..21: mol_type = genomic DNA
gccttttatccatatgccacc

SEQ ID NO: 1289 - DNA, 20 bp, Homo sapiens
  source 1..20: mol_type = genomic DNA
gccctcaactttgcttttca

SEQ ID NO: 1290 - DNA, 20 bp, Homo sapiens
  source 1..20: mol_type = genomic DNA
aaaaacctgcactgtgttcg

SEQ ID NO: 1291 - DNA, 22 bp, Homo sapiens
  source 1..22: mol_type = genomic DNA
tttttacagcaatcttcactgc

SEQ ID NO: 1292 - DNA, 22 bp, Homo sapiens
  source 1..22: mol_type = genomic DNA
taagccggaatgatttgtaagg

SEQ ID NO: 1293 - DNA, 20 bp, Homo sapiens
  source 1..20: mol_type = genomic DNA
taccctttggcttaacagct

SEQ ID NO: 1294 - DNA, 20 bp, Homo sapiens
  source 1..20: mol_type = genomic DNA
agttgtcatgttgggctcat

SEQ ID NO: 1295 - DNA, 22 bp, Homo sapiens
  source 1..22: mol_type = genomic DNA
tgtcctaagttacctgtctgac

SEQ ID NO: 1296 - DNA, 21 bp, Homo sapiens
  source 1..21: mol_type = genomic DNA
gccctggaaagtactgtaaca

SEQ ID NO: 1297 - DNA, 20 bp, Homo sapiens
  source 1..20: mol_type = genomic DNA
tgttacagccaggctttcat

SEQ ID NO: 1298 - DNA, 20 bp, Homo sapiens
  source 1..20: mol_type = genomic DNA
caacgaacacagggtttaca

SEQ ID NO: 1299 - DNA, 21 bp, Homo sapiens
  source 1..21: mol_type = genomic DNA
ccaggactctctcttttcttc

SEQ ID NO: 1300 - DNA, 22 bp, Homo sapiens
  source 1..22: mol_type = genomic DNA
gacacataagaccactttaggc

SEQ ID NO: 1301 - DNA, 21 bp, Homo sapiens
  source 1..21: mol_type = genomic DNA
gatatgttctggaggactgct

SEQ ID NO: 1302 - DNA, 20 bp, Homo sapiens
  source 1..20: mol_type = genomic DNA
tgattctcacaggctccttg

SEQ ID NO: 1303 - DNA, 22 bp, Homo sapiens
  source 1..22: mol_type = genomic DNA
tgatggaagtttctaggtcagt

SEQ ID NO: 1304 - DNA, 20 bp, Homo sapiens
  source 1..20: mol_type = genomic DNA
aacactcttgctccctatgt

SEQ ID NO: 1305 - DNA, 21 bp, Homo sapiens
  source 1..21: mol_type = genomic DNA
tttctctcccagcttgatctt

SEQ ID NO: 1306 - DNA, 20 bp, Homo sapiens
  source 1..20: mol_type = genomic DNA
ctgtgcagagacgaactaag

SEQ ID NO: 1307 - DNA, 19 bp, Homo sapiens
  source 1..19: mol_type = genomic DNA
ctctcggagcaaagacctt

SEQ ID NO: 1308 - DNA, 20 bp, Homo sapiens
  source 1..20: mol_type = genomic DNA
acctcataagtacgcccatc

SEQ ID NO: 1309 - DNA, 20 bp, Homo sapiens
  source 1..20: mol_type = genomic DNA
tgatcttcctttgctcctgt

SEQ ID NO: 1310 - DNA, 20 bp, Homo sapiens
  source 1..20: mol_type = genomic DNA
atgacgacgatgttggagag

SEQ ID NO: 1311 - DNA, 20 bp, Homo sapiens
  source 1..20: mol_type = genomic DNA
tccttcagcaagcctctttt

SEQ ID NO: 1312 - DNA, 20 bp, Homo sapiens
  source 1..20: mol_type = genomic DNA
tgagggtgataacctgtgag

SEQ ID NO: 1313 - DNA, 20 bp, Homo sapiens
  source 1..20: mol_type = genomic DNA
ggcttgaagtttgtctgtga

SEQ ID NO: 1314 - DNA, 20 bp, Homo sapiens
  source 1..20: mol_type = genomic DNA
ggattttcacattgctcagc

SEQ ID NO: 1315 - DNA, 21 bp, Homo sapiens
  source 1..21: mol_type = genomic DNA
tagcatgagagtgaactgagg

SEQ ID NO: 1316 - DNA, 20 bp, Homo sapiens
  source 1..20: mol_type = genomic DNA
cagccacatagcccatatct

SEQ ID NO: 1317 - DNA, 20 bp, Homo sapiens
  source 1..20: mol_type = genomic DNA
tgcccatgagtctacttgtg

SEQ ID NO: 1318 - DNA, 20 bp, Homo sapiens
  source 1..20: mol_type = genomic DNA
aagtggactgagggacaatt

SEQ ID NO: 1319 - DNA, 22 bp, Homo sapiens
  source 1..22: mol_type = genomic DNA
tcagactgagcattaaatcacc

SEQ ID NO: 1320 - DNA, 20 bp, Homo sapiens
  source 1..20: mol_type = genomic DNA
taggtctggaagaatgccag

SEQ ID NO: 1321 - DNA, 20 bp, Homo sapiens
  source 1..20: mol_type = genomic DNA
agtatcttgggcttgtgaca

SEQ ID NO: 1322 - DNA, 20 bp, Homo sapiens
  source 1..20: mol_type = genomic DNA
gctccacttccagtctttct

SEQ ID NO: 1323 - DNA, 20 bp, Homo sapiens
  source 1..20: mol_type = genomic DNA
ttggaatagtgagcctccct

SEQ ID NO: 1324 - DNA, 20 bp, Homo sapiens
  source 1..20: mol_type = genomic DNA
tctggggctctttgtctttg

SEQ ID NO: 1325 - DNA, 20 bp, Homo sapiens
  source 1..20: mol_type = genomic DNA
atttttcctcccctgtagct

SEQ ID NO: 1326 - DNA, 20 bp, Homo sapiens
  source 1..20: mol_type = genomic DNA
ctgggcacactgtattacca

SEQ ID NO: 1327 - DNA, 20 bp, Homo sapiens
  source 1..20: mol_type = genomic DNA
caccacgtttctaatgcaga

SEQ ID NO: 1328 - DNA, 20 bp, Homo sapiens
  source 1..20: mol_type = genomic DNA
gagttgaaaaaggtccacgc

SEQ ID NO: 1329 - DNA, 20 bp, Homo sapiens
  source 1..20: mol_type = genomic DNA
cagaggaaagacacagtgct

SEQ ID NO: 1330 - DNA, 20 bp, Homo sapiens
  source 1..20: mol_type = genomic DNA
tcttggttttgaggctgtca

SEQ ID NO: 1331 - DNA, 20 bp, Homo sapiens
  source 1..20: mol_type = genomic DNA
atcagcctaattctccccac

SEQ ID NO: 1332 - DNA, 20 bp, Homo sapiens
  source 1..20: mol_type = genomic DNA
atcccccatcatccatactc

SEQ ID NO: 1333 - DNA, 20 bp, Homo sapiens
  source 1..20: mol_type = genomic DNA
catagctaggcctgtgagtg

SEQ ID NO: 1334 - DNA, 19 bp, Homo sapiens
  source 1..19: mol_type = genomic DNA
tcagcttgctccttctctg

SEQ ID NO: 1335 - DNA, 20 bp, Homo sapiens
  source 1..20: mol_type = genomic DNA
ctaggtcctcagcagtgttt

SEQ ID NO: 1336 - DNA, 21 bp, Homo sapiens
  source 1..21: mol_type = genomic DNA
tcccagagttaacaatacccc

SEQ ID NO: 1337 - DNA, 20 bp, Homo sapiens
  source 1..20: mol_type = genomic DNA
ccatttgcactgccgatttc

SEQ ID NO: 1338 - DNA, 21 bp, Homo sapiens
  source 1..21: mol_type = genomic DNA
actagtcccaaaagcctacac

SEQ ID NO: 1339 - DNA, 20 bp, Homo sapiens
  source 1..20: mol_type = genomic DNA
aacagcagcgtcagaataac

SEQ ID NO: 1340 - DNA, 20 bp, Homo sapiens
  source 1..20: mol_type = genomic DNA
aggtctttacgggaaggaaa

SEQ ID NO: 1341 - DNA, 20 bp, Homo sapiens
  source 1..20: mol_type = genomic DNA
tgagggagaagtttggtagg

SEQ ID NO: 1342 - DNA, 20 bp, Homo sapiens
  source 1..20: mol_type = genomic DNA
ccctgtctaaagagccatgt

SEQ ID NO: 1343 - DNA, 20 bp, Homo sapiens
  source 1..20: mol_type = genomic DNA
gtttggagtttcgatgcctt

SEQ ID NO: 1344 - DNA, 20 bp, Homo sapiens
  source 1..20: mol_type = genomic DNA
atgttttggtcctgggagaa

SEQ ID NO: 1345 - DNA, 20 bp, Homo sapiens
  source 1..20: mol_type = genomic DNA
ggaagtggttagggcagatt

SEQ ID NO: 1346 - DNA, 21 bp, Homo sapiens
  source 1..21: mol_type = genomic DNA
agcccagtaaagataagaggc

SEQ ID NO: 1347 - DNA, 20 bp, Homo sapiens
  source 1..20: mol_type = genomic DNA
cccttccctttcatccaaga

SEQ ID NO: 1348 - DNA, 20 bp, Homo sapiens
  source 1..20: mol_type = genomic DNA
ctgaaaccttctccttagcc

SEQ ID NO: 1349 - DNA, 20 bp, Homo sapiens
  source 1..20: mol_type = genomic DNA
attatccaacctgacctgca

SEQ ID NO: 1350 - DNA, 19 bp, Homo sapiens
  source 1..19: mol_type = genomic DNA
aggtgcaaagctgttcatg

SEQ ID NO: 1351 - DNA, 20 bp, Homo sapiens
  source 1..20: mol_type = genomic DNA
aatgccaagattgtccttca

SEQ ID NO: 1352 - DNA, 19 bp, Homo sapiens
  source 1..19: mol_type = genomic DNA
tgcgaaacctcagtgatca

SEQ ID NO: 1353 - DNA, 20 bp, Homo sapiens
  source 1..20: mol_type = genomic DNA
cacttccttcagcacacttt

SEQ ID NO: 1354 - DNA, 20 bp, Homo sapiens
  source 1..20: mol_type = genomic DNA
ccggctctctatgaaagtga

SEQ ID NO: 1355 - DNA, 20 bp, Homo sapiens
  source 1..20: mol_type = genomic DNA
acttgtctgtctgcctgttt

SEQ ID NO: 1356 - DNA, 19 bp, Homo sapiens
  source 1..19: mol_type = genomic DNA
ctgatgcgctgaaaaccaa

SEQ ID NO: 1357 - DNA, 20 bp, Homo sapiens
  source 1..20: mol_type = genomic DNA
ttccatgtgttcttcctccc

SEQ ID NO: 1358 - DNA, 20 bp, Homo sapiens
  source 1..20: mol_type = genomic DNA
agcagtagggttaacaggag

SEQ ID NO: 1359 - DNA, 19 bp, Homo sapiens
  source 1..19: mol_type = genomic DNA
gcagcaatgtttcggtgta

SEQ ID NO: 1360 - DNA, 20 bp, Homo sapiens
  source 1..20: mol_type = genomic DNA
tactaatggctgggggtaac

SEQ ID NO: 1361 - DNA, 20 bp, Homo sapiens
  source 1..20: mol_type = genomic DNA
ctgatgaggctaaaggacca

SEQ ID NO: 1362 - DNA, 20 bp, Homo sapiens
  source 1..20: mol_type = genomic DNA
cagagttctccatcccagac

SEQ ID NO: 1363 - DNA, 20 bp, Homo sapiens
  source 1..20: mol_type = genomic DNA
ctgagttcctccttttgcct

SEQ ID NO: 1364 - DNA, 20 bp, Homo sapiens
  source 1..20: mol_type = genomic DNA
gcaaaaggtggtgttagctg

SEQ ID NO: 1365 - DNA, 20 bp, Homo sapiens
  source 1..20: mol_type = genomic DNA
atccacatcccatgcctaag

SEQ ID NO: 1366 - DNA, 20 bp, Homo sapiens
  source 1..20: mol_type = genomic DNA
tctattcctttggcacctcc

SEQ ID NO: 1367 - DNA, 20 bp, Homo sapiens
  source 1..20: mol_type = genomic DNA
aggaaaggagagctttgtcc

SEQ ID NO: 1368 - DNA, 20 bp, Homo sapiens
  source 1..20: mol_type = genomic DNA
cctttcagcttccaagtcct

SEQ ID NO: 1369 - DNA, 21 bp, Homo sapiens
  source 1..21: mol_type = genomic DNA
gctctcttcctcccactaaaa

SEQ ID NO: 1370 - DNA, 20 bp, Homo sapiens
  source 1..20: mol_type = genomic DNA
actgcctgtgttttcttcct

SEQ ID NO: 1371 - DNA, 20 bp, Homo sapiens
  source 1..20: mol_type = genomic DNA
aaagcaatttcttccccagc

SEQ ID NO: 1372 - DNA, 20 bp, Homo sapiens
  source 1..20: mol_type = genomic DNA
tgtctgttgccattccttct

SEQ ID NO: 1373 - DNA, 20 bp, Homo sapiens
  source 1..20: mol_type = genomic DNA
tgactgtgacttgtgctttc

SEQ ID NO: 1374 - DNA, 20 bp, Homo sapiens
  source 1..20: mol_type = genomic DNA
gaattacatttccctgggcg

SEQ ID NO: 1375 - DNA, 20 bp, Homo sapiens
  source 1..20: mol_type = genomic DNA
tgaaaccgtcttccttgtct

SEQ ID NO: 1376 - DNA, 20 bp, Homo sapiens
  source 1..20: mol_type = genomic DNA
tttaaagcagagcaggacct

SEQ ID NO: 1377 - DNA, 20 bp, Homo sapiens
  source 1..20: mol_type = genomic DNA
tttatgacacacagagcagc

SEQ ID NO: 1378 - DNA, 20 bp, Homo sapiens
  source 1..20: mol_type = genomic DNA
atgtgtttgaccctttccct

SEQ ID NO: 1379 - DNA, 21 bp, Homo sapiens
  source 1..21: mol_type = genomic DNA
atcctgaagttgttccacatc

SEQ ID NO: 1380 - DNA, 21 bp, Homo sapiens
  source 1..21: mol_type = genomic DNA
gaccctgctttgttactagga

SEQ ID NO: 1381 - DNA, 20 bp, Homo sapiens
  source 1..20: mol_type = genomic DNA
tggacatggacatttcaacg

SEQ ID NO: 1382 - DNA, 20 bp, Homo sapiens
  source 1..20: mol_type = genomic DNA
aaaaatgcttccacttgcct

SEQ ID NO: 1383 - DNA, 20 bp, Homo sapiens
  source 1..20: mol_type = genomic DNA
gcacctccaacaacattcaa

SEQ ID NO: 1384 - DNA, 18 bp, Homo sapiens
  source 1..18: mol_type = genomic DNA
ttggaaatggggctggag

SEQ ID NO: 1385 - DNA, 21 bp, Homo sapiens
  source 1..21: mol_type = genomic DNA
actggtctattgggggaaaat

SEQ ID NO: 1386 - DNA, 20 bp, Homo sapiens
  source 1..20: mol_type = genomic DNA
agtgttaggaaagcagagtg

SEQ ID NO: 1387 - DNA, 20 bp, Homo sapiens
  source 1..20: mol_type = genomic DNA
tggacagggtttcacaagat

SEQ ID NO: 1388 - DNA, 20 bp, Homo sapiens
  source 1..20: mol_type = genomic DNA
ctcctctccatctttccagg

SEQ ID NO: 1389 - DNA, 21 bp, Homo sapiens
  source 1..21: mol_type = genomic DNA
ataggctgacttccacatctc

SEQ ID NO: 1390 - DNA, 20 bp, Homo sapiens
  source 1..20: mol_type = genomic DNA
tgtgggggtcaattctaacg

SEQ ID NO: 1391 - DNA, 20 bp, Homo sapiens
  source 1..20: mol_type = genomic DNA
ccaacgggtagtggtagatt

SEQ ID NO: 1392 - DNA, 20 bp, Homo sapiens
  source 1..20: mol_type = genomic DNA
cttaccccacttcttcctga

SEQ ID NO: 1393 - DNA, 19 bp, Homo sapiens
  source 1..19: mol_type = genomic DNA
cctgtcacaactgcctttg

SEQ ID NO: 1394 - DNA, 20 bp, Homo sapiens
  source 1..20: mol_type = genomic DNA
tttgccattttgtgatgcca

SEQ ID NO: 1395 - DNA, 20 bp, Homo sapiens
  source 1..20: mol_type = genomic DNA
ggagtttcaggttggcagaa

SEQ ID NO: 1396 - DNA, 20 bp, Homo sapiens
  source 1..20: mol_type = genomic DNA
acagcttgcttcaaactaca

SEQ ID NO: 1397 - DNA, 20 bp, Homo sapiens
  source 1..20: mol_type = genomic DNA
ttgaaggggcaaaatacagc

SEQ ID NO: 1398 - DNA, 20 bp, Homo sapiens
  source 1..20: mol_type = genomic DNA
gccccaaattgtaacaaagc

SEQ ID NO: 1399 - DNA, 20 bp, Homo sapiens
  source 1..20: mol_type = genomic DNA
tgacgaagactccaacacaa

SEQ ID NO: 1400 - DNA, 20 bp, Homo sapiens
  source 1..20: mol_type = genomic DNA
aagtcagggaaatgaagctg

SEQ ID NO: 1401 - DNA, 20 bp, Homo sapiens
  source 1..20: mol_type = genomic DNA
gtaacacagtgctccttctc

SEQ ID NO: 1402 - DNA, 20 bp, Homo sapiens
  source 1..20: mol_type = genomic DNA
ggccccaattagctgatttc

SEQ ID NO: 1403 - DNA, 20 bp, Homo sapiens
  source 1..20: mol_type = genomic DNA
ctgagcagggaaaaatccag

SEQ ID NO: 1404 - DNA, 20 bp, Homo sapiens
  source 1..20: mol_type = genomic DNA
acaaaggattcaggtgcagt

SEQ ID NO: 1405 - DNA, 20 bp, Homo sapiens
  source 1..20: mol_type = genomic DNA
acaggttttgctcttcagga

SEQ ID NO: 1406 - DNA, 21 bp, Homo sapiens
  source 1..21: mol_type = genomic DNA
ggcaagtttgtctggttcatt

SEQ ID NO: 1407 - DNA, 20 bp, Homo sapiens
  source 1..20: mol_type = genomic DNA
ccatctgcatctgtctcctt

SEQ ID NO: 1408 - DNA, 19 bp, Homo sapiens
  source 1..19: mol_type = genomic DNA
gctcctctccttctccctt

SEQ ID NO: 1409 - DNA, 20 bp, Homo sapiens
  source 1..20: mol_type = genomic DNA
tgtataagggcaatcgtggt

SEQ ID NO: 1410 - DNA, 20 bp, Homo sapiens
  source 1..20: mol_type = genomic DNA
aaggaaccaggtcagacaag

SEQ ID NO: 1411 - DNA, 21 bp, Homo sapiens
  source 1..21: mol_type = genomic DNA
gttagaaggcaaacatcatgc

SEQ ID NO: 1412 - DNA, 20 bp, Homo sapiens
  source 1..20: mol_type = genomic DNA
tgcagtcataggaaaaggct

SEQ ID NO: 1413 - DNA, 19 bp, Homo sapiens
  source 1..19: mol_type = genomic DNA
gcagtcagaatggtttggc

SEQ ID NO: 1414 - DNA, 21 bp, Homo sapiens
  source 1..21: mol_type = genomic DNA
agacattggtttggttggttc

SEQ ID NO: 1415 - DNA, 20 bp, Homo sapiens
  source 1..20: mol_type = genomic DNA
acacaaatgaaagcccgtac

SEQ ID NO: 1416 - DNA, 20 bp, Homo sapiens
  source 1..20: mol_type = genomic DNA
ggtctgctgtttctctttgc

SEQ ID NO: 1417 - DNA, 20 bp, Homo sapiens
  source 1..20: mol_type = genomic DNA
agagccttaccaagctgaag

SEQ ID NO: 1418 - DNA, 20 bp, Homo sapiens
  source 1..20: mol_type = genomic DNA
gggatggttacttagtgggg

SEQ ID NO: 1419 - DNA, 20 bp, Homo sapiens
  source 1..20: mol_type = genomic DNA
ttacactcgccttccaaaca

SEQ ID NO: 1420 - DNA, 20 bp, Homo sapiens
  source 1..20: mol_type = genomic DNA
gagagaggaggagttggaag

SEQ ID NO: 1421 - DNA, 20 bp, Homo sapiens
  source 1..20: mol_type = genomic DNA
atccacgacatccaaaatca

SEQ ID NO: 1422 - DNA, 20 bp, Homo sapiens
  source 1..20: mol_type = genomic DNA
ttgtgcaagaagaaacctgc

SEQ ID NO: 1423 - DNA, 20 bp, Homo sapiens
  source 1..20: mol_type = genomic DNA
ggccttgcataaaccacatt

SEQ ID NO: 1424 - DNA, 20 bp, Homo sapiens
  source 1..20: mol_type = genomic DNA
tttgtaattggtcctcgcct

SEQ ID NO: 1425 - DNA, 20 bp, Homo sapiens
  source 1..20: mol_type = genomic DNA
caagtatttcatggcgctcc

SEQ ID NO: 1426 - DNA, 21 bp, Homo sapiens
  source 1..21: mol_type = genomic DNA
gtcaacagtatcagcttccaa

SEQ ID NO: 1427 - DNA, 20 bp, Homo sapiens
  source 1..20: mol_type = genomic DNA
tgggcttctttttcattccg

SEQ ID NO: 1428 - DNA, 20 bp, Homo sapiens
  source 1..20: mol_type = genomic DNA
tcaacaagctctctgttcac

SEQ ID NO: 1429 - DNA, 20 bp, Homo sapiens
  source 1..20: mol_type = genomic DNA
gtgcaaacagtgacctcaat

SEQ ID NO: 1430 - DNA, 20 bp, Homo sapiens
  source 1..20: mol_type = genomic DNA
gctgggctgctttaatttct

SEQ ID NO: 1431 - DNA, 20 bp, Homo sapiens
  source 1..20: mol_type = genomic DNA
ggaattgtggggtcaaatgg

SEQ ID NO: 1432 - DNA, 21 bp, Homo sapiens
  source 1..21: mol_type = genomic DNA
ctagtgcttctacctccagac

SEQ ID NO: 1433 - DNA, 20 bp, Homo sapiens
  source 1..20: mol_type = genomic DNA
aaccacacactaacagggaa

SEQ ID NO: 1434 - DNA, 20 bp, Homo sapiens
  source 1..20: mol_type = genomic DNA
tctagtttgccctctttccc

SEQ ID NO: 1435 - DNA, 20 bp, Homo sapiens
  source 1..20: mol_type = genomic DNA
cgaattgcttccttgctctg

SEQ ID NO: 1436 - DNA, 22 bp, Homo sapiens
  source 1..22: mol_type = genomic DNA
tctatcacagcaggaaatcact

SEQ ID NO: 1437 - DNA, 20 bp, Homo sapiens
  source 1..20: mol_type = genomic DNA
tcttcgtgtttctctagccc

SEQ ID NO: 1438 - DNA, 20 bp, Homo sapiens
  source 1..20: mol_type = genomic DNA
ttgaagagctaaagggggag

SEQ ID NO: 1439 - DNA, 20 bp, Homo sapiens
  source 1..20: mol_type = genomic DNA
tgtcaccgtactacctaagc

SEQ ID NO: 1440 - DNA, 19 bp, Homo sapiens
  source 1..19: mol_type = genomic DNA
agtacgctcctttgcagag

SEQ ID NO: 1441 - DNA, 20 bp, Homo sapiens
  source 1..20: mol_type = genomic DNA
ttacggggacacaaaatggt

SEQ ID NO: 1442 - DNA, 19 bp, Homo sapiens
  source 1..19: mol_type = genomic DNA
ctgtgctttgcccttgaag

SEQ ID NO: 1443 - DNA, 20 bp, Homo sapiens
  source 1..20: mol_type = genomic DNA
aagtcaacccatatgccact

SEQ ID NO: 1444 - DNA, 20 bp, Homo sapiens
  source 1..20: mol_type = genomic DNA
acattcaggctgtcacacat

SEQ ID NO: 1445 - DNA, 23 bp, Homo sapiens
  source 1..23: mol_type = genomic DNA
tcatgtcactagttttataaggc

SEQ ID NO: 1446 - DNA, 20 bp, Homo sapiens
  source 1..20: mol_type = genomic DNA
agtagtgaggctccaaagtg

SEQ ID NO: 1447 - DNA, 20 bp, Homo sapiens
  source 1..20: mol_type = genomic DNA
tgggaggagtttgctgttta

SEQ ID NO: 1448 - DNA, 20 bp, Homo sapiens
  source 1..20: mol_type = genomic DNA
ttctaagcctgtgactgaca

SEQ ID NO: 1449 - DNA, 20 bp, Homo sapiens
  source 1..20: mol_type = genomic DNA
tgaacctgactttccttggg

SEQ ID NO: 1450 - DNA, 20 bp, Homo sapiens
  source 1..20: mol_type = genomic DNA
gccattctatcatctcggga

SEQ ID NO: 1451 - DNA, 19 bp, Homo sapiens
  source 1..19: mol_type = genomic DNA
agtctctccctgaaaccca

SEQ ID NO: 1452 - DNA, 20 bp, Homo sapiens
  source 1..20: mol_type = genomic DNA
aagagttggcttggagttga

SEQ ID NO: 1453 - DNA, 21 bp, Homo sapiens
  source 1..21: mol_type = genomic DNA
cccacaattatgaaaggaggt

SEQ ID NO: 1454 - DNA, 20 bp, Homo sapiens
  source 1..20: mol_type = genomic DNA
ttgaccaggacaaatgagga

SEQ ID NO: 1455 - DNA, 20 bp, Homo sapiens
  source 1..20: mol_type = genomic DNA
cactttgttggtctgggtca

SEQ ID NO: 1456 - DNA, 20 bp, Homo sapiens
  source 1..20: mol_type = genomic DNA
gggactctaggtggggttaa

SEQ ID NO: 1457 - DNA, 20 bp, Homo sapiens
  source 1..20: mol_type = genomic DNA
gtttatgccttgggattgcc

SEQ ID NO: 1458 - DNA, 20 bp, Homo sapiens
  source 1..20: mol_type = genomic DNA
gtgtggtaaggatgctagga

SEQ ID NO: 1459 - DNA, 20 bp, Homo sapiens
  source 1..20: mol_type = genomic DNA
gaaagtgactcctccctgac

SEQ ID NO: 1460 - DNA, 20 bp, Homo sapiens
  source 1..20: mol_type = genomic DNA
ccaggttctgttctctgtca

SEQ ID NO: 1461 - DNA, 20 bp, Homo sapiens
  source 1..20: mol_type = genomic DNA
gtgagacatggttgctgttc

SEQ ID NO: 1462 - DNA, 20 bp, Homo sapiens
  source 1..20: mol_type = genomic DNA
ctttctcctgctccacctat

SEQ ID NO: 1463 - DNA, 20 bp, Homo sapiens
  source 1..20: mol_type = genomic DNA
ctatgtgtgttccaacccga

SEQ ID NO: 1464 - DNA, 20 bp, Homo sapiens
  source 1..20: mol_type = genomic DNA
gggaccttctaaccatgtgt

SEQ ID NO: 1465 - DNA, 20 bp, Homo sapiens
  source 1..20: mol_type = genomic DNA
cgggattttgaaaaggcaga

SEQ ID NO: 1466 - DNA, 20 bp, Homo sapiens
  source 1..20: mol_type = genomic DNA
gtgttgtctctcagctcctc

SEQ ID NO: 1467 - DNA, 20 bp, Homo sapiens
  source 1..20: mol_type = genomic DNA
gttctctggttaaggccctt

SEQ ID NO: 1468 - DNA, 20 bp, Homo sapiens
  source 1..20: mol_type = genomic DNA
cctcttcacctataagcccc

SEQ ID NO: 1469 - DNA, 20 bp, Homo sapiens
  source 1..20: mol_type = genomic DNA
taggggacagtaagccagat

SEQ ID NO: 1470 - DNA, 20 bp, Homo sapiens
  source 1..20: mol_type = genomic DNA
acgatggacctctgttgaac

SEQ ID NO: 1471 - DNA, 21 bp, Homo sapiens
  source 1..21: mol_type = genomic DNA
attcccatccatccatcactc

SEQ ID NO: 1472 - DNA, 20 bp, Homo sapiens
  source 1..20: mol_type = genomic DNA
tcgtttttggatggtggttg

SEQ ID NO: 1473 - DNA, 21 bp, Homo sapiens
  source 1..21: mol_type = genomic DNA
gaagttcctccagtagactca

SEQ ID NO: 1474 - DNA, 20 bp, Homo sapiens
  source 1..20: mol_type = genomic DNA
ttgtttgagtctgggaggaa

SEQ ID NO: 1475 - DNA, 20 bp, Homo sapiens
  source 1..20: mol_type = genomic DNA
aatactgtgagactgccacc

SEQ ID NO: 1476 - DNA, 20 bp, Homo sapiens
  source 1..20: mol_type = genomic DNA
cagtcacggaaagtaccctc

SEQ ID NO: 1477 - DNA, 20 bp, Homo sapiens
  source 1..20: mol_type = genomic DNA
accatgtttccctctgtcac

SEQ ID NO: 1478 - DNA, 20 bp, Homo sapiens
  source 1..20: mol_type = genomic DNA
ttaccaagggacaggatgga

SEQ ID NO: 1479 - DNA, 20 bp, Homo sapiens
  source 1..20: mol_type = genomic DNA
ccctagaggtcaaggtatgg

SEQ ID NO: 1480 - DNA, 20 bp, Homo sapiens
  source 1..20: mol_type = genomic DNA
ataggccctgtgtgttagtt

SEQ ID NO: 1481 - DNA, 20 bp, Homo sapiens
  source 1..20: mol_type = genomic DNA
agaaagtcccctccatttct

SEQ ID NO: 1482 - DNA, 20 bp, Homo sapiens
  source 1..20: mol_type = genomic DNA
gccaatgccaaagtcagtta

SEQ ID NO: 1483 - DNA, 20 bp, Homo sapiens
  source 1..20: mol_type = genomic DNA
gaggacgagttgaacaaagc

SEQ ID NO: 1484 - DNA, 21 bp, Homo sapiens
  source 1..21: mol_type = genomic DNA
atactggtctcaaggtagcac

SEQ ID NO: 1485 - DNA, 22 bp, Homo sapiens
  source 1..22: mol_type = genomic DNA
accaagtgaagctgagttaatg

SEQ ID NO: 1486 - DNA, 20 bp, Homo sapiens
  source 1..20: mol_type = genomic DNA
cccagatacactcctgcttc

SEQ ID NO: 1487 - DNA, 20 bp, Homo sapiens
  source 1..20: mol_type = genomic DNA
caaacatgagagggggagaa

SEQ ID NO: 1488 - DNA, 20 bp, Homo sapiens
  source 1..20: mol_type = genomic DNA
aaacacagcaatgaggaagg

SEQ ID NO: 1489 - DNA, 20 bp, Homo sapiens
  source 1..20: mol_type = genomic DNA
gatactcccctgtgttgctt

SEQ ID NO: 1490 - DNA, 20 bp, Homo sapiens
  source 1..20: mol_type = genomic DNA
gctcttactaggatggcagg

SEQ ID NO: 1491 - DNA, 20 bp, Homo sapiens
  source 1..20: mol_type = genomic DNA
gtttccagcagcaatccttt

SEQ ID NO: 1492 - DNA, 19 bp, Homo sapiens
  source 1..19: mol_type = genomic DNA
ctgtgcagaagggttagct

SEQ ID NO: 1493 - DNA, 20 bp, Homo sapiens
  source 1..20: mol_type = genomic DNA
aaacccctgctacccaaaat

SEQ ID NO: 1494 - DNA, 20 bp, Homo sapiens
  source 1..20: mol_type = genomic DNA
aatgcccagatgctgttttc

SEQ ID NO: 1495 - DNA, 21 bp, Homo sapiens
  source 1..21: mol_type = genomic DNA
gagtggttgttctctccagat

SEQ ID NO: 1496 - DNA, 20 bp, Homo sapiens
  source 1..20: mol_type = genomic DNA
cagtctagaagctcacccag

SEQ ID NO: 1497 - DNA, 20 bp, Homo sapiens
  source 1..20: mol_type = genomic DNA
tctcctctacccctacactg

SEQ ID NO: 1498 - DNA, 20 bp, Homo sapiens
  source 1..20: mol_type = genomic DNA
ggtgtaaatgtggcctctcc

SEQ ID NO: 1499 - DNA, 20 bp, Homo sapiens
  source 1..20: mol_type = genomic DNA
acaaagctacaaactctggc

SEQ ID NO: 1500 - DNA, 20 bp, Homo sapiens
  source 1..20: mol_type = genomic DNA
tttcactgggagactgatgc

SEQ ID NO: 1501 - DNA, 20 bp, Homo sapiens
  source 1..20: mol_type = genomic DNA
ctgttctgttcctgaggcta

SEQ ID NO: 1502 - DNA, 21 bp, Homo sapiens
  source 1..21: mol_type = genomic DNA
tgtgtatccattgcctcatct

SEQ ID NO: 1503 - DNA, 20 bp, Homo sapiens
  source 1..20: mol_type = genomic DNA
gaagagggtgtgtgtaggac

SEQ ID NO: 1504 - DNA, 20 bp, Homo sapiens
  source 1..20: mol_type = genomic DNA
tggttgctcttcctagttcc

SEQ ID NO: 1505 - DNA, 20 bp, Homo sapiens
  source 1..20: mol_type = genomic DNA
caatgtggaggaagctcttg

SEQ ID NO: 1506 - DNA, 20 bp, Homo sapiens
  source 1..20: mol_type = genomic DNA
ttgcacacccaatatgctac

SEQ ID NO: 1507 - DNA, 20 bp, Homo sapiens
  source 1..20: mol_type = genomic DNA
tccaaggtttctctagcgac

SEQ ID NO: 1508 - DNA, 20 bp, Homo sapiens
  source 1..20: mol_type = genomic DNA
tcgctattctccttgccata

SEQ ID NO: 1509 - DNA, 20 bp, Homo sapiens
  source 1..20: mol_type = genomic DNA
aacagcctctttccttagca

SEQ ID NO: 1510 - DNA, 20 bp, Homo sapiens
  source 1..20: mol_type = genomic DNA
tttttggctcagtgggatgt

SEQ ID NO: 1511 - DNA, 21 bp, Homo sapiens
  source 1..21: mol_type = genomic DNA
ctgttcattcttcttcagggc

SEQ ID NO: 1512 - DNA, 20 bp, Homo sapiens
  source 1..20: mol_type = genomic DNA
ttcccgagcccataaactac

SEQ ID NO: 1513 - DNA, 20 bp, Homo sapiens
  source 1..20: mol_type = genomic DNA
tgctcagatttcagcttcct

SEQ ID NO: 1514 - DNA, 20 bp, Homo sapiens
  source 1..20: mol_type = genomic DNA
gtcagcgatgtggatgtcta

SEQ ID NO: 1515 - DNA, 20 bp, Homo sapiens
  source 1..20: mol_type = genomic DNA
aactgactccatgacctgtg

SEQ ID NO: 1516 - DNA, 20 bp, Homo sapiens
  source 1..20: mol_type = genomic DNA
gaagctgctacttggtgaac

SEQ ID NO: 1517 - DNA, 20 bp, Homo sapiens
  source 1..20: mol_type = genomic DNA
ttttcctcctgttctgttgc

SEQ ID NO: 1518 - DNA, 20 bp, Homo sapiens
  source 1..20: mol_type = genomic DNA
ttctcaaatgcaaccactcc

SEQ ID NO: 1519 - DNA, 20 bp, Homo sapiens
  source 1..20: mol_type = genomic DNA
ctggcccttcaatttcatgc

SEQ ID NO: 1520 - DNA, 21 bp, Homo sapiens
  source 1..21: mol_type = genomic DNA
ccagcagtaccgatatcagag

SEQ ID NO: 1521 - DNA, 20 bp, Homo sapiens
  source 1..20: mol_type = genomic DNA
cagaaggcaggagatggatt

SEQ ID NO: 1522 - DNA, 20 bp, Homo sapiens
  source 1..20: mol_type = genomic DNA
aagcaaccattttcctgagc

SEQ ID NO: 1523 - DNA, 20 bp, Homo sapiens
  source 1..20: mol_type = genomic DNA
tcacccttcatctacccact

SEQ ID NO: 1524 - DNA, 20 bp, Homo sapiens
  source 1..20: mol_type = genomic DNA
aagctggtgaccttctacag

SEQ ID NO: 1525 - DNA, 20 bp, Homo sapiens
  source 1..20: mol_type = genomic DNA
aaaattctggttggggagga

SEQ ID NO: 1526 - DNA, 20 bp, Homo sapiens
  source 1..20: mol_type = genomic DNA
ccatacctcatctgctctgt

SEQ ID NO: 1527 - DNA, 20 bp, Homo sapiens
  source 1..20: mol_type = genomic DNA
ggctgtccctgaactacttt

SEQ ID NO: 1528 - DNA, 20 bp, Homo sapiens
  source 1..20: mol_type = genomic DNA
cttggcttaaactctgctcc

SEQ ID NO: 1529 - DNA, 20 bp, Homo sapiens
  source 1..20: mol_type = genomic DNA
gacttgaacacaccctcaga

SEQ ID NO: 1530 - DNA, 20 bp, Homo sapiens
  source 1..20: mol_type = genomic DNA
aggagaagagaccattgcag

SEQ ID NO: 1531 - DNA, 20 bp, Homo sapiens
  source 1..20: mol_type = genomic DNA
ttagctaagtctgtgcggag

SEQ ID NO: 1532 - DNA, 19 bp, Homo sapiens
  source 1..19: mol_type = genomic DNA
gaagcaacactgtacacgc

SEQ ID NO: 1533 - DNA, 20 bp, Homo sapiens
  source 1..20: mol_type = genomic DNA
tctgataaaggctggctcat

SEQ ID NO: 1534 - DNA, 20 bp, Homo sapiens
  source 1..20: mol_type = genomic DNA
taaaacagtgccgctacttc

SEQ ID NO: 1535 - DNA, 20 bp, Homo sapiens
  source 1..20: mol_type = genomic DNA
agtgctatgagtcttggtcc

SEQ ID NO: 1536 - DNA, 20 bp, Homo sapiens
  source 1..20: mol_type = genomic DNA
ggaaaacatgcggtggtcta

SEQ ID NO: 1537 - DNA, 20 bp, Homo sapiens
  source 1..20: mol_type = genomic DNA
gcagagaaatgggttaaggg

SEQ ID NO: 1538 - DNA, 20 bp, Homo sapiens
  source 1..20: mol_type = genomic DNA
ggtagaggtgggttatctgt

SEQ ID NO: 1539 - DNA, 19 bp, Homo sapiens
  source 1..19: mol_type = genomic DNA
ctgtaaatctccgggggtg

SEQ ID NO: 1540 - DNA, 20 bp, Homo sapiens
  source 1..20: mol_type = genomic DNA
ggcgagaatggagagagaaa

SEQ ID NO: 1541 - DNA, 20 bp, Homo sapiens
  source 1..20: mol_type = genomic DNA
tcccaagccaggattctttt

SEQ ID NO: 1542 - DNA, 20 bp, Homo sapiens
  source 1..20: mol_type = genomic DNA
gaacaagtacaaccgtgcag

SEQ ID NO: 1543 - DNA, 20 bp, Homo sapiens
  source 1..20: mol_type = genomic DNA
acaaatgccccatatcaacc

SEQ ID NO: 1544 - DNA, 20 bp, Homo sapiens
  source 1..20: mol_type = genomic DNA
ggaaagaggcctggagtaat

SEQ ID NO: 1545 - DNA, 20 bp, Homo sapiens
  source 1..20: mol_type = genomic DNA
tttccactggatgtcgtcat

SEQ ID NO: 1546 - DNA, 20 bp, Homo sapiens
  source 1..20: mol_type = genomic DNA
aggacaaagtttcagcctct

SEQ ID NO: 1547 - DNA, 21 bp, Homo sapiens
  source 1..21: mol_type = genomic DNA
actcaggacacgacttcatac

SEQ ID NO: 1548 - DNA, 20 bp, Homo sapiens
  source 1..20: mol_type = genomic DNA
acatctttggctcactggtt

SEQ ID NO: 1549 - DNA, 20 bp, Homo sapiens
  source 1..20: mol_type = genomic DNA
tcacagtgggcttcattcag

SEQ ID NO: 1550 - DNA, 22 bp, Homo sapiens
  source 1..22: mol_type = genomic DNA
agctggaatctatgtaggatgg

SEQ ID NO: 1551 - DNA, 20 bp, Homo sapiens
  source 1..20: mol_type = genomic DNA
ctgcggaaggatctagtctt

SEQ ID NO: 1552 - DNA, 22 bp, Homo sapiens
  source 1..22: mol_type = genomic DNA
tgagaagtattcagcatttccc

SEQ ID NO: 1553 - DNA, 19 bp, Homo sapiens
  source 1..19: mol_type = genomic DNA
cactcacggacttttaggc

SEQ ID NO: 1554 - DNA, 18 bp, Homo sapiens
  source 1..18: mol_type = genomic DNA
aaaaaaaaaaaaaaaaaa

SEQ ID NO: 1555 - DNA, 20 bp, Homo sapiens
  source 1..20: mol_type = genomic DNA
tcacacgccaggttattaca

SEQ ID NO: 1556 - DNA, 20 bp, Homo sapiens
  source 1..20: mol_type = genomic DNA
aagtgggtttgcagtttgga

SEQ ID NO: 1557 - DNA, 20 bp, Homo sapiens
  source 1..20: mol_type = genomic DNA
atgtacgtgtgtgtccatgt

SEQ ID NO: 1558 - DNA, 20 bp, Homo sapiens
  source 1..20: mol_type = genomic DNA
aggcgggttggtcaataata

SEQ ID NO: 1559 - DNA, 20 bp, Homo sapiens
  source 1..20: mol_type = genomic DNA
ccacaaatcccatcaacaca

SEQ ID NO: 1560 - DNA, 20 bp, Homo sapiens
  source 1..20: mol_type = genomic DNA
tttcacagtaacatcggcac

SEQ ID NO: 1561 - DNA, 20 bp, Homo sapiens
  source 1..20: mol_type = genomic DNA
ctgacagcctgcatttgatt

SEQ ID NO: 1562 - DNA, 21 bp, Homo sapiens
  source 1..21: mol_type = genomic DNA
tttcctggagtaaagcgatct

SEQ ID NO: 1563 - DNA, 20 bp, Homo sapiens
  source 1..20: mol_type = genomic DNA
cccacaatcacccatctcta

SEQ ID NO: 1564 - DNA, 20 bp, Homo sapiens
  source 1..20: mol_type = genomic DNA
tatctcactccacagcttcc

SEQ ID NO: 1565 - DNA, 20 bp, Homo sapiens
  source 1..20: mol_type = genomic DNA
acaggtagtttggtggtgtc

SEQ ID NO: 1566 - DNA, 20 bp, Homo sapiens
  source 1..20: mol_type = genomic DNA
gctgttgaatgccagaactt

SEQ ID NO: 1567 - DNA, 20 bp, Homo sapiens
  source 1..20: mol_type = genomic DNA
atagggtcggttttggtctg

SEQ ID NO: 1568 - DNA, 20 bp, Homo sapiens
  source 1..20: mol_type = genomic DNA
catcatccctgtcattccca

SEQ ID NO: 1569 - DNA, 20 bp, Homo sapiens
  source 1..20: mol_type = genomic DNA
gtgggctaagaaaacacctc

SEQ ID NO: 1570 - DNA, 20 bp, Homo sapiens
  source 1..20: mol_type = genomic DNA
attgtggtttgtggcatgtg

SEQ ID NO: 1571 - DNA, 20 bp, Homo sapiens
  source 1..20: mol_type = genomic DNA
ccagattcagcctgtattcc

SEQ ID NO: 1572 - DNA, 20 bp, Homo sapiens
  source 1..20: mol_type = genomic DNA
gcccatggaagtaaacagtc

SEQ ID NO: 1573 - DNA, 22 bp, Homo sapiens
  source 1..22: mol_type = genomic DNA
aggtttgacataatagtgctgc

SEQ ID NO: 1574 - DNA, 20 bp, Homo sapiens
  source 1..20: mol_type = genomic DNA
aatcctttccccactcactg

SEQ ID NO: 1575 - DNA, 20 bp, Homo sapiens
  source 1..20: mol_type = genomic DNA
cacaaagcagttccatgtcc

SEQ ID NO: 1576 - DNA, 20 bp, Homo sapiens
  source 1..20: mol_type = genomic DNA
ggacaatttctcacttgcca

SEQ ID NO: 1577 - DNA, 20 bp, Homo sapiens
  source 1..20: mol_type = genomic DNA
aaggggtgttgttagatgct

SEQ ID NO: 1578 - DNA, 20 bp, Homo sapiens
  source 1..20: mol_type = genomic DNA
gcatcacacacagcagatac

SEQ ID NO: 1579 - DNA, 20 bp, Homo sapiens
  source 1..20: mol_type = genomic DNA
aaaatgtccgtcccagatga

SEQ ID NO: 1580 - DNA, 20 bp, Homo sapiens
  source 1..20: mol_type = genomic DNA
gggggaaaatgtgttgtgtt

SEQ ID NO: 1581 - DNA, 20 bp, Homo sapiens
  source 1..20: mol_type = genomic DNA
aactgttagcttctccaccc

SEQ ID NO: 1582 - DNA, 20 bp, Homo sapiens
  source 1..20: mol_type = genomic DNA
cgagtgtaggttccggttta

SEQ ID NO: 1583 - DNA, 20 bp, Homo sapiens
  source 1..20: mol_type = genomic DNA
agaatgcccatttcaggagt

SEQ ID NO: 1584 - DNA, 21 bp, Homo sapiens
  source 1..21: mol_type = genomic DNA
atatgtggtttgaggtcagct

SEQ ID NO: 1585 - DNA, 19 bp, Homo sapiens
  source 1..19: mol_type = genomic DNA
ggctttggtcacatggaga

SEQ ID NO: 1586 - DNA, 20 bp, Homo sapiens
  source 1..20: mol_type = genomic DNA
tgaggcaagattcagtgact

SEQ ID NO: 1587 - DNA, 20 bp, Homo sapiens
  source 1..20: mol_type = genomic DNA
acttcatcttgacagcagct

SEQ ID NO: 1588 - DNA, 22 bp, Homo sapiens
  source 1..22: mol_type = genomic DNA
cacttcctcatgatgttttgga

SEQ ID NO: 1589 - DNA, 20 bp, Homo sapiens
  source 1..20: mol_type = genomic DNA
ggccagcccacttatttttg

SEQ ID NO: 1590 - DNA, 20 bp, Homo sapiens
  source 1..20: mol_type = genomic DNA
ctcagggtggagtttcaaac

SEQ ID NO: 1591 - DNA, 20 bp, Homo sapiens
  source 1..20: mol_type = genomic DNA
gatctttcttcccctcctcc

SEQ ID NO: 1592 - DNA, 21 bp, Homo sapiens
  source 1..21: mol_type = genomic DNA
tgtacatccaccacttgtttg

SEQ ID NO: 1593 - DNA, 20 bp, Homo sapiens
  source 1..20: mol_type = genomic DNA
agcggtagtaagaaggcaaa

SEQ ID NO: 1594 - DNA, 20 bp, Homo sapiens
  source 1..20: mol_type = genomic DNA
agacaggtgaccattttccc

SEQ ID NO: 1595 - DNA, 20 bp, Homo sapiens
  source 1..20: mol_type = genomic DNA
tgtggaacttttgagccaga

SEQ ID NO: 1596 - DNA, 21 bp, Homo sapiens
  source 1..21: mol_type = genomic DNA
cataacgaaatagggccttcc

SEQ ID NO: 1597 - DNA, 21 bp, Homo sapiens
  source 1..21: mol_type = genomic DNA
atttctgcctcttctcttccc

SEQ ID NO: 1598 - DNA, 20 bp, Homo sapiens
  source 1..20: mol_type = genomic DNA
tcatcaagtcacctctccac

SEQ ID NO: 1599 - DNA, 20 bp, Homo sapiens
  source 1..20: mol_type = genomic DNA
tggaaaactagacagcagcc

SEQ ID NO: 1600 - DNA, 20 bp, Homo sapiens
  source 1..20: mol_type = genomic DNA
ggaaaggggaaaaggtgaca

SEQ ID NO: 1601 - DNA, 20 bp, Homo sapiens
  source 1..20: mol_type = genomic DNA
ctgtcctctgtcccacataa

SEQ ID NO: 1602 - DNA, 20 bp, Homo sapiens
  source 1..20: mol_type = genomic DNA
tttctgagtccattccccat

SEQ ID NO: 1603 - DNA, 20 bp, Homo sapiens
  source 1..20: mol_type = genomic DNA
ggccatcctgatatcttcca

SEQ ID NO: 1604 - DNA, 20 bp, Homo sapiens
  source 1..20: mol_type = genomic DNA
cagagagatgcagaggttca

SEQ ID NO: 1605 - DNA, 20 bp, Homo sapiens
  source 1..20: mol_type = genomic DNA
tgtgtgtgagctagctgaat

SEQ ID NO: 1606 - DNA, 20 bp, Homo sapiens
  source 1..20: mol_type = genomic DNA
ggtttcccatcctaccacat

SEQ ID NO: 1607 - DNA, 20 bp, Homo sapiens
  source 1..20: mol_type = genomic DNA
ggtgcttttgttgccttact

SEQ ID NO: 1608 - DNA, 20 bp, Homo sapiens
  source 1..20: mol_type = genomic DNA
actagaaagcagggtacagt

SEQ ID NO: 1609 - DNA, 20 bp, Homo sapiens
  source 1..20: mol_type = genomic DNA
gctttttccaacttctgctg

SEQ ID NO: 1610 - DNA, 20 bp, Homo sapiens
  source 1..20: mol_type = genomic DNA
caacagacaagtcacctcct

SEQ ID NO: 1611 - DNA, 20 bp, Homo sapiens
  source 1..20: mol_type = genomic DNA
ggttcttcctggacttcaaa

SEQ ID NO: 1612 - DNA, 21 bp, Homo sapiens
  source 1..21: mol_type = genomic DNA
gaaagcagtagtttcaggtgt

SEQ ID NO: 1613 - DNA, 20 bp, Homo sapiens
  source 1..20: mol_type = genomic DNA
tgaaagactctgttgccatg

SEQ ID NO: 1614 - DNA, 20 bp, Homo sapiens
  source 1..20: mol_type = genomic DNA
cactacacgctcagaacaaa

SEQ ID NO: 1615 - DNA, 20 bp, Homo sapiens
  source 1..20: mol_type = genomic DNA
aaggcaagcaataatgaggc

SEQ ID NO: 1616 - DNA, 21 bp, Homo sapiens
  source 1..21: mol_type = genomic DNA
ggacagtctgtgaaaattgct

SEQ ID NO: 1617 - DNA, 20 bp, Homo sapiens
  source 1..20: mol_type = genomic DNA
acaaacaacccttaatgccc

SEQ ID NO: 1618 - DNA, 20 bp, Homo sapiens
  source 1..20: mol_type = genomic DNA
tgaaacagtgaatccgcaat

SEQ ID NO: 1619 - DNA, 21 bp, Homo sapiens
  source 1..21: mol_type = genomic DNA
aagggaaatgtggatgcagta

SEQ ID NO: 1620 - DNA, 19 bp, Homo sapiens
  source 1..19: mol_type = genomic DNA
ttgaagggaagcggaaagt

SEQ ID NO: 1621 - DNA, 21 bp, Homo sapiens
  source 1..21: mol_type = genomic DNA
atttccagctaatgatgctcc

SEQ ID NO: 1622 - DNA, 20 bp, Homo sapiens
  source 1..20: mol_type = genomic DNA
gctcacttacgcattaacca

SEQ ID NO: 1623 - DNA, 20 bp, Homo sapiens
  source 1..20: mol_type = genomic DNA
acaggcaaaattcagttgga

SEQ ID NO: 1624 - DNA, 20 bp, Homo sapiens
  source 1..20: mol_type = genomic DNA
aggctgaatcacgtcaaaac

SEQ ID NO: 1625 - DNA, 19 bp, Homo sapiens
  source 1..19: mol_type = genomic DNA
cctcgttcacatttgacgc

SEQ ID NO: 1626 - DNA, 20 bp, Homo sapiens
  source 1..20: mol_type = genomic DNA
tgtctgggttcaactgtttg

SEQ ID NO: 1627 - DNA, 20 bp, Homo sapiens
  source 1..20: mol_type = genomic DNA
attttgcatgcctgttgaga

SEQ ID NO: 1628 - DNA, 20 bp, Homo sapiens
  source 1..20: mol_type = genomic DNA
gctctcctcaaaacccaagt

SEQ ID NO: 1629 - DNA, 20 bp, Homo sapiens
  source 1..20: mol_type = genomic DNA
cttaatgagggggcacaaag

SEQ ID NO: 1630 - DNA, 20 bp, Homo sapiens
  source 1..20: mol_type = genomic DNA
ttttcgtccagtcttccacc

SEQ ID NO: 1631 - DNA, 20 bp, Homo sapiens
  source 1..20: mol_type = genomic DNA
tacaggaccgtcagtgagag

SEQ ID NO: 1632 - DNA, 20 bp, Homo sapiens
  source 1..20: mol_type = genomic DNA
ttagctactgacgcttcacc

SEQ ID NO: 1633 - DNA, 20 bp, Homo sapiens
  source 1..20: mol_type = genomic DNA
gcacagacaacatgctagtt

SEQ ID NO: 1634 - DNA, 20 bp, Homo sapiens
  source 1..20: mol_type = genomic DNA
ttagtctgttcactggcaca

SEQ ID NO: 1635 - DNA, 19 bp, Homo sapiens
  source 1..19: mol_type = genomic DNA
cttatcagcagggcacagt

SEQ ID NO: 1636 - DNA, 20 bp, Homo sapiens
  source 1..20: mol_type = genomic DNA
ttgcatcaaacaaagccaca

SEQ ID NO: 1637 - DNA, 20 bp, Homo sapiens
  source 1..20: mol_type = genomic DNA
gagagacaagtcaccccttc

SEQ ID NO: 1638 - DNA, 20 bp, Homo sapiens
  source 1..20: mol_type = genomic DNA
agtcaactacaaatggggga

SEQ ID NO: 1639 - DNA, 20 bp, Homo sapiens
  source 1..20: mol_type = genomic DNA
gtgccaaaatcaacgaaagc

SEQ ID NO: 1640 - DNA, 21 bp, Homo sapiens
  source 1..21: mol_type = genomic DNA
aaggagggagtacaaagtgag

SEQ ID NO: 1641 - DNA, 20 bp, Homo sapiens
  source 1..20: mol_type = genomic DNA
atcacattttcagcacgagg

SEQ ID NO: 1642 - DNA, 20 bp, Homo sapiens
  source 1..20: mol_type = genomic DNA
cagggagggatgatttggaa

SEQ ID NO: 1643 - DNA, 20 bp, Homo sapiens
  source 1..20: mol_type = genomic DNA
agaactgagaggggagcata

SEQ ID NO: 1644 - DNA, 20 bp, Homo sapiens
  source 1..20: mol_type = genomic DNA
cagtcaccaacaaaggcttt

SEQ ID NO: 1645 - DNA, 20 bp, Homo sapiens
  source 1..20: mol_type = genomic DNA
tccccatctccctaactcat

SEQ ID NO: 1646 - DNA, 20 bp, Homo sapiens
  source 1..20: mol_type = genomic DNA
tttttctgctgcatccaagg

SEQ ID NO: 1647 - DNA, 20 bp, Homo sapiens
  source 1..20: mol_type = genomic DNA
actgtacgccatgaaaaaca

SEQ ID NO: 1648 - DNA, 20 bp, Homo sapiens
  source 1..20: mol_type = genomic DNA
ggcaaatcaagtgagctgac

SEQ ID NO: 1649 - DNA, 20 bp, Homo sapiens
  source 1..20: mol_type = genomic DNA
cgtgggtggagaatttcaca

SEQ ID NO: 1650 - DNA, 20 bp, Homo sapiens
  source 1..20: mol_type = genomic DNA
acttaggtcagttgcttggt

SEQ ID NO: 1651 - DNA, 20 bp, Homo sapiens
  source 1..20: mol_type = genomic DNA
gacttcatcagcacgtactt

SEQ ID NO: 1652 - DNA, 20 bp, Homo sapiens
  source 1..20: mol_type = genomic DNA
tgcaggcaaaattagcatgg

SEQ ID NO: 1653 - DNA, 20 bp, Homo sapiens
  source 1..20: mol_type = genomic DNA
gacttatctgctttcacccc

SEQ ID NO: 1654 - DNA, 20 bp, Homo sapiens
  source 1..20: mol_type = genomic DNA
ccccatgaacctaagaccat

SEQ ID NO: 1655 - DNA, 20 bp, Homo sapiens
  source 1..20: mol_type = genomic DNA
tctggacatgtctttgcgta

SEQ ID NO: 1656 - DNA, 20 bp, Homo sapiens
  source 1..20: mol_type = genomic DNA
ctccaggacatctcagcaat

SEQ ID NO: 1657 - DNA, 20 bp, Homo sapiens
  source 1..20: mol_type = genomic DNA
cctctcgtgtgggaaatgta

SEQ ID NO: 1658 - DNA, 20 bp, Homo sapiens
  source 1..20: mol_type = genomic DNA
tatctctggctacctcctgt

SEQ ID NO: 1659 - DNA, 19 bp, Homo sapiens
  source 1..19: mol_type = genomic DNA
ccccatccctgtaccaaag

SEQ ID NO: 1660 - DNA, 20 bp, Homo sapiens
  source 1..20: mol_type = genomic DNA
ctgcagagatattccatggc

SEQ ID NO: 1661 - DNA, 20 bp, Homo sapiens
  source 1..20: mol_type = genomic DNA
aaagctgggttcttaggctt

SEQ ID NO: 1662 - DNA, 20 bp, Homo sapiens
  source 1..20: mol_type = genomic DNA
gctgttttaggggcacattt

SEQ ID NO: 1663 - DNA, 20 bp, Homo sapiens
  source 1..20: mol_type = genomic DNA
aagaggcaatgtggaggtta

SEQ ID NO: 1664 - DNA, 21 bp, Homo sapiens
  source 1..21: mol_type = genomic DNA
gcccaaacaatctgcctttta

SEQ ID NO: 1665 - DNA, 20 bp, Homo sapiens
  source 1..20: mol_type = genomic DNA
tggcttcaaataactgggct

SEQ ID NO: 1666 - DNA, 20 bp, Homo sapiens
  source 1..20: mol_type = genomic DNA
agagcacacagaacagaact

SEQ ID NO: 1667 - DNA, 20 bp, Homo sapiens
  source 1..20: mol_type = genomic DNA
ctggtggatttctcgtcaga

SEQ ID NO: 1668 - DNA, 20 bp, Homo sapiens
  source 1..20: mol_type = genomic DNA
taggtgtttgtgtgaggctt

SEQ ID NO: 1669 - DNA, 20 bp, Homo sapiens
  source 1..20: mol_type = genomic DNA
gcctcactgctcctatcttt

SEQ ID NO: 1670 - DNA, 19 bp, Homo sapiens
  source 1..19: mol_type = genomic DNA
ctctagcagctgttcctcc

SEQ ID NO: 1671 - DNA, 20 bp, Homo sapiens
  source 1..20: mol_type = genomic DNA
cgtcgtatctctggctttgt

SEQ ID NO: 1672 - DNA, 20 bp, Homo sapiens
  source 1..20: mol_type = genomic DNA
gtccccaacctcatctttca

SEQ ID NO: 1673 - DNA, 20 bp, Homo sapiens
  source 1..20: mol_type = genomic DNA
tcttcaaagatggctgcaaa

SEQ ID NO: 1674 - DNA, 21 bp, Homo sapiens
  source 1..21: mol_type = genomic DNA
agtataaccagatagccgtgc

SEQ ID NO: 1675 - DNA, 20 bp, Homo sapiens
  source 1..20: mol_type = genomic DNA
tgtcctcagggcaataaagt

SEQ ID NO: 1676 - DNA, 20 bp, Homo sapiens
  source 1..20: mol_type = genomic DNA
tttgctgcttgaagtggaac

SEQ ID NO: 1677 - DNA, 20 bp, Homo sapiens
  source 1..20: mol_type = genomic DNA
gctgcaatgacctgatttct

SEQ ID NO: 1678 - DNA, 20 bp, Homo sapiens
  source 1..20: mol_type = genomic DNA
tccctctctcctccaaatga

SEQ ID NO: 1679 - DNA, 21 bp, Homo sapiens
  source 1..21: mol_type = genomic DNA
tgccacagtaggtataggttg

SEQ ID NO: 1680 - DNA, 20 bp, Homo sapiens
  source 1..20: mol_type = genomic DNA
ccctcgccctaaagaaacta

SEQ ID NO: 1681 - DNA, 20 bp, Homo sapiens
  source 1..20: mol_type = genomic DNA
cccctgaatccctacctcat

SEQ ID NO: 1682 - DNA, 21 bp, Homo sapiens
  source 1..21: mol_type = genomic DNA
tgttgtacaagtgagccattc

SEQ ID NO: 1683 - DNA, 21 bp, Homo sapiens
  source 1..21: mol_type = genomic DNA
accaagcaatcaactcactct

SEQ ID NO: 1684 - DNA, 21 bp, Homo sapiens
  source 1..21: mol_type = genomic DNA
gcccaatttgtctagccaata

SEQ ID NO: 1685 - DNA, 21 bp, Homo sapiens
  source 1..21: mol_type = genomic DNA
ctactgatcccaaagaaggca

SEQ ID NO: 1686 - DNA, 21 bp, Homo sapiens
  source 1..21: mol_type = genomic DNA
gtgaaaggttctatctgccaa

SEQ ID NO: 1687 - DNA, 21 bp, Homo sapiens
  source 1..21: mol_type = genomic DNA
ggcataccgagcatacataga

SEQ ID NO: 1688 - DNA, 21 bp, Homo sapiens
  source 1..21: mol_type = genomic DNA
cacctgtttcaccaaatcact

SEQ ID NO: 1689 - DNA, 21 bp, Homo sapiens
  source 1..21: mol_type = genomic DNA
tctcatgctctgacagacaag

SEQ ID NO: 1690 - DNA, 21 bp, Homo sapiens
  source 1..21: mol_type = genomic DNA
ttgtcctgtttctcttgtgac

SEQ ID NO: 1691 - DNA, 21 bp, Homo sapiens
  source 1..21: mol_type = genomic DNA
cacaggactgcatgcctatta

SEQ ID NO: 1692 - DNA, 21 bp, Homo sapiens
  source 1..21: mol_type = genomic DNA
gactctctcagcatcgagttt

SEQ ID NO: 1693 - DNA, 21 bp, Homo sapiens
  source 1..21: mol_type = genomic DNA
ctgatggaagggcattatcca

SEQ ID NO: 1694 - DNA, 22 bp, Homo sapiens
  source 1..22: mol_type = genomic DNA
ttctggttccataaatccatgc

SEQ ID NO: 1695 - DNA, 22 bp, Homo sapiens
  source 1..22: mol_type = genomic DNA
gggattattgttggctactgag

SEQ ID NO: 1696 - DNA, 21 bp, Homo sapiens
  source 1..21: mol_type = genomic DNA
aattggtgacctagggatcag

SEQ ID NO: 1697 - DNA, 21 bp, Homo sapiens
  source 1..21: mol_type = genomic DNA
gggtttggtaagggagaatga

SEQ ID NO: 1698 - DNA, 23 bp, Homo sapiens
  source 1..23: mol_type = genomic DNA
aagacatcccagttatgcattgt

SEQ ID NO: 1699 - DNA, 21 bp, Homo sapiens
  source 1..21: mol_type = genomic DNA
agatgggagggagattagaca

SEQ ID NO: 1700 - DNA, 21 bp, Homo sapiens
  source 1..21: mol_type = genomic DNA
gagtagcaacaacacatggag

SEQ ID NO: 1701 - DNA, 21 bp, Homo sapiens
  source 1..21: mol_type = genomic DNA
ttctccttcattagccacaca

SEQ ID NO: 1702 - DNA, 21 bp, Homo sapiens
  source 1..21: mol_type = genomic DNA
agtctgcactgtactcttctg

SEQ ID NO: 1703 - DNA, 21 bp, Homo sapiens
  source 1..21: mol_type = genomic DNA
acaaatggttcatgatggtgg

SEQ ID NO: 1704 - DNA, 21 bp, Homo sapiens
  source 1..21: mol_type = genomic DNA
ggtactcacgtttcagtttcc

SEQ ID NO: 1705 - DNA, 21 bp, Homo sapiens
  source 1..21: mol_type = genomic DNA
gttcatttctacagtccaggc

SEQ ID NO: 1706 - DNA, 21 bp, Homo sapiens
  source 1..21: mol_type = genomic DNA
ctctcactgtgctgcttaaag

SEQ ID NO: 1707 - DNA, 22 bp, Homo sapiens
  source 1..22: mol_type = genomic DNA
caaagaattccacagagatggg

SEQ ID NO: 1708 - DNA, 21 bp, Homo sapiens
  source 1..21: mol_type = genomic DNA
tgagctacagacaagattgca

SEQ ID NO: 1709 - DNA, 21 bp, Homo sapiens
  source 1..21: mol_type = genomic DNA
tcacatgggatcgacatatgc

SEQ ID NO: 1710 - DNA, 21 bp, Homo sapiens
  source 1..21: mol_type = genomic DNA
ccacacaatttcctggctatg

SEQ ID NO: 1711 - DNA, 21 bp, Homo sapiens
  source 1..21: mol_type = genomic DNA
tcttgcttctggagagttctt

SEQ ID NO: 1712 - DNA, 21 bp, Homo sapiens
  source 1..21: mol_type = genomic DNA
aggttatgcagacttcaggaa

SEQ ID NO: 1713 - DNA, 21 bp, Homo sapiens
  source 1..21: mol_type = genomic DNA
aagccaattctgcctctctag

SEQ ID NO: 1714 - DNA, 21 bp, Homo sapiens
  source 1..21: mol_type = genomic DNA
tcccttccttattctggcaac

SEQ ID NO: 1715 - DNA, 21 bp, Homo sapiens
  source 1..21: mol_type = genomic DNA
gcttcaaacactctaaagggc

SEQ ID NO: 1716 - DNA, 21 bp, Homo sapiens
  source 1..21: mol_type = genomic DNA
tgccattaatgagaagtgctg

SEQ ID NO: 1717 - DNA, 22 bp, Homo sapiens
  source 1..22: mol_type = genomic DNA
tggcaatcctgttaaacaactc

SEQ ID NO: 1718 - DNA, 22 bp, Homo sapiens
  source 1..22: mol_type = genomic DNA
cccgaacattgataacagaaga

SEQ ID NO: 1719 - DNA, 22 bp, Homo sapiens
  source 1..22: mol_type = genomic DNA
gcaactcaggaaagactacatc

SEQ ID NO: 1720 - DNA, 22 bp, Homo sapiens
  source 1..22: mol_type = genomic DNA
ttaagaaagtacccatcctccc

SEQ ID NO: 1721 - DNA, 21 bp, Homo sapiens
  source 1..21: mol_type = genomic DNA
gtcatgccttacaacttagca

SEQ ID NO: 1722 - DNA, 21 bp, Homo sapiens
  source 1..21: mol_type = genomic DNA
aatctttgccaaggtatgagc

SEQ ID NO: 1723 - DNA, 21 bp, Homo sapiens
  source 1..21: mol_type = genomic DNA
gccacttatacctccagacat

SEQ ID NO: 1724 - DNA, 20 bp, Homo sapiens
  source 1..20: mol_type = genomic DNA
ccacaatcctgaatgccatg

SEQ ID NO: 1725 - DNA, 21 bp, Homo sapiens
  source 1..21: mol_type = genomic DNA
ctgcaaggtacaacacaagtc

SEQ ID NO: 1726 - DNA, 21 bp, Homo sapiens
  source 1..21: mol_type = genomic DNA
atctctgtgccagcaagtatt

SEQ ID NO: 1727 - DNA, 21 bp, Homo sapiens
  source 1..21: mol_type = genomic DNA
attgggaaactgtcactgatg

SEQ ID NO: 1728 - DNA, 21 bp, Homo sapiens
  source 1..21: mol_type = genomic DNA
gccctaatagagaagcaaagc

SEQ ID NO: 1729 - DNA, 21 bp, Homo sapiens
  source 1..21: mol_type = genomic DNA
gggagccaatcagatagaagt

SEQ ID NO: 1730 - DNA, 22 bp, Homo sapiens
  source 1..22: mol_type = genomic DNA
gggaagttgggctatttaatgc

SEQ ID NO: 1731 - DNA, 21 bp, Homo sapiens
  source 1..21: mol_type = genomic DNA
aactgtgtagagcgaccaaat

SEQ ID NO: 1732 - DNA, 21 bp, Homo sapiens
  source 1..21: mol_type = genomic DNA
cagtaaggccatggtctagat

SEQ ID NO: 1733 - DNA, 21 bp, Homo sapiens
  source 1..21: mol_type = genomic DNA
ctcagaacatttgcaccttct

SEQ ID NO: 1734 - DNA, 21 bp, Homo sapiens
  source 1..21: mol_type = genomic DNA
acctgatacaatggagcatgt

SEQ ID NO: 1735 - DNA, 21 bp, Homo sapiens
  source 1..21: mol_type = genomic DNA
gggacctaaactcctttggaa

SEQ ID NO: 1736 - DNA, 21 bp, Homo sapiens
  source 1..21: mol_type = genomic DNA
tctgcagtggtgttatctagt

SEQ ID NO: 1737 - DNA, 20 bp, Homo sapiens
  source 1..20: mol_type = genomic DNA
cacttaagtttccacgccag

SEQ ID NO: 1738 - DNA, 21 bp, Homo sapiens
  source 1..21: mol_type = genomic DNA
gtaatggcgagaggttaaagc

SEQ ID NO: 1739 - DNA, 22 bp, Homo sapiens
  source 1..22: mol_type = genomic DNA
tttaggtatcgaagttgggtca

SEQ ID NO: 1740 - DNA, 22 bp, Homo sapiens
  source 1..22: mol_type = genomic DNA
gataagtttggaagctgcatca

SEQ ID NO: 1741 - DNA, 21 bp, Homo sapiens
  source 1..21: mol_type = genomic DNA
aagctctgccattgactttac

SEQ ID NO: 1742 - DNA, 20 bp, Homo sapiens
  source 1..20: mol_type = genomic DNA
ccctacagaaccgaggaatc

SEQ ID NO: 1743 - DNA, 21 bp, Homo sapiens
  source 1..21: mol_type = genomic DNA
tcaatctttgcatacacagcc

SEQ ID NO: 1744 - DNA, 22 bp, Homo sapiens
  source 1..22: mol_type = genomic DNA
gtaggtttacatggacagatgc

SEQ ID NO: 1745 - DNA, 21 bp, Homo sapiens
  source 1..21: mol_type = genomic DNA
tcttctgtttagtgctgtggt

SEQ ID NO: 1746 - DNA, 21 bp, Homo sapiens
  source 1..21: mol_type = genomic DNA
caagttcatttcttccctgca

SEQ ID NO: 1747 - DNA, 21 bp, Homo sapiens
  source 1..21: mol_type = genomic DNA
tgcaggaatacatggtagaca

SEQ ID NO: 1748 - DNA, 21 bp, Homo sapiens
  source 1..21: mol_type = genomic DNA
cataggccttcatgtctctca

SEQ ID NO: 1749 - DNA, 21 bp, Homo sapiens
  source 1..21: mol_type = genomic DNA
tatgagggtgcactaacagat

SEQ ID NO: 1750 - DNA, 21 bp, Homo sapiens
  source 1..21: mol_type = genomic DNA
ggtgctactactggtgtatgt

SEQ ID NO: 1751 - DNA, 21 bp, Homo sapiens
  source 1..21: mol_type = genomic DNA
gccatgcaatatcaaatccca

SEQ ID NO: 1752 - DNA, 21 bp, Homo sapiens
  source 1..21: mol_type = genomic DNA
gaaaccaaagactagtgcagc

SEQ ID NO: 1753 - DNA, 21 bp, Homo sapiens
  source 1..21: mol_type = genomic DNA
atgactaacactctgccaagt

SEQ ID NO: 1754 - DNA, 21 bp, Homo sapiens
  source 1..21: mol_type = genomic DNA
aacaaatgcatcccagacaga

SEQ ID NO: 1755 - DNA, 21 bp, Homo sapiens
  source 1..21: mol_type = genomic DNA
gcagagaggagtatgtggtat

SEQ ID NO: 1756 - DNA, 21 bp, Homo sapiens
  source 1..21: mol_type = genomic DNA
atgggtcattctacgaagcaa

SEQ ID NO: 1757 - DNA, 22 bp, Homo sapiens
  source 1..22: mol_type = genomic DNA
tggtgtgtgtggtgataattag

SEQ ID NO: 1758 - DNA, 21 bp, Homo sapiens
  source 1..21: mol_type = genomic DNA
agtgaccctctgaataacctg

SEQ ID NO: 1759 - DNA, 21 bp, Homo sapiens
  source 1..21: mol_type = genomic DNA
tcagcaagtaaacctgagacc

SEQ ID NO: 1760 - DNA, 20 bp, Homo sapiens
  source 1..20: mol_type = genomic DNA
gtaccttcaccctccagatc

SEQ ID NO: 1761 - DNA, 21 bp, Homo sapiens
  source 1..21: mol_type = genomic DNA
tcatcaaattgcccactccta

SEQ ID NO: 1762 - DNA, 21 bp, Homo sapiens
  source 1..21: mol_type = genomic DNA
catcagactgtcttgcctttc

SEQ ID NO: 1763 - DNA, 21 bp, Homo sapiens
  source 1..21: mol_type = genomic DNA
cattcttgctgacatttccca

SEQ ID NO: 1764 - DNA, 22 bp, Homo sapiens
  source 1..22: mol_type = genomic DNA
gaagatcagggtattgctgaaa

SEQ ID NO: 1765 - DNA, 21 bp, Homo sapiens
  source 1..21: mol_type = genomic DNA
tttgtaggtcattcagcctcc

SEQ ID NO: 1766 - DNA, 22 bp, Homo sapiens
  source 1..22: mol_type = genomic DNA
tggctaggattcacttaggaaa

SEQ ID NO: 1767 - DNA, 21 bp, Homo sapiens
  source 1..21: mol_type = genomic DNA
gcaaacagggtgaattatgct

SEQ ID NO: 1768 - DNA, 21 bp, Homo sapiens
  source 1..21: mol_type = genomic DNA
agaagtctgggaaacgaagag

SEQ ID NO: 1769 - DNA, 21 bp, Homo sapiens
  source 1..21: mol_type = genomic DNA
cagatgctccattactaggtg

SEQ ID NO: 1770 - DNA, 21 bp, Homo sapiens
  source 1..21: mol_type = genomic DNA
cacatggagaaaggtgaatca

SEQ ID NO: 1771 - DNA, 20 bp, Homo sapiens
  source 1..20: mol_type = genomic DNA
tcccatccaatactgccttc

SEQ ID NO: 1772 - DNA, 21 bp, Homo sapiens
  source 1..21: mol_type = genomic DNA
tctggctcaaaggatcacatg

SEQ ID NO: 1773 - DNA, 21 bp, Homo sapiens
  source 1..21: mol_type = genomic DNA
aagatcccattgaccctgaat

SEQ ID NO: 1774 - DNA, 21 bp, Homo sapiens
  source 1..21: mol_type = genomic DNA
ccacaggctctctagaactaa

SEQ ID NO: 1775 - DNA, 21 bp, Homo sapiens
  source 1..21: mol_type = genomic DNA
ttgagagggtttacaaggtcc

SEQ ID NO: 1776 - DNA, 22 bp, Homo sapiens
  source 1..22: mol_type = genomic DNA
cttctcctactctgcattctca

SEQ ID NO: 1777 - DNA, 21 bp, Homo sapiens
  source 1..21: mol_type = genomic DNA
gacattagtggattcaggcca

SEQ ID NO: 1778 - DNA, 21 bp, Homo sapiens
  source 1..21: mol_type = genomic DNA
gctgaagtggaggcaattaac

SEQ ID NO: 1779 - DNA, 21 bp, Homo sapiens
  source 1..21: mol_type = genomic DNA
tataactgttgagtctgccca

SEQ ID NO: 1780 - DNA, 21 bp, Homo sapiens
  source 1..21: mol_type = genomic DNA
actgagcttacattcatgcac

SEQ ID NO: 1781 - DNA, 21 bp, Homo sapiens
  source 1..21: mol_type = genomic DNA
gccactttctctgcaaagaat

SEQ ID NO: 1782 - DNA, 21 bp, Homo sapiens
  source 1..21: mol_type = genomic DNA
acttcctacggactcaaatct

SEQ ID NO: 1783 - DNA, 21 bp, Homo sapiens
  source 1..21: mol_type = genomic DNA
ggctctcattacaattggctg

SEQ ID NO: 1784 - DNA, 21 bp, Homo sapiens
  source 1..21: mol_type = genomic DNA
attgctttcagtggtggattg

SEQ ID NO: 1785 - DNA, 21 bp, Homo sapiens
  source 1..21: mol_type = genomic DNA
ggaatgaaacagaggagtccc

SEQ ID NO: 1786 - DNA, 21 bp, Homo sapiens
  source 1..21: mol_type = genomic DNA
aagatgctagaaacccacaag

SEQ ID NO: 1787 - DNA, 20 bp, Homo sapiens
  source 1..20: mol_type = genomic DNA
aatgggtgggttacagagag

SEQ ID NO: 1788 - DNA, 20 bp, Homo sapiens
  source 1..20: mol_type = genomic DNA
gcatttggacatgaacaagc

SEQ ID NO: 1789 - DNA, 20 bp, Homo sapiens
  source 1..20: mol_type = genomic DNA
cattggtgggtggatagctg

SEQ ID NO: 1790 - DNA, 20 bp, Homo sapiens
  source 1..20: mol_type = genomic DNA
accaggaggagaaaagcaaa

SEQ ID NO: 1791 - DNA, 20 bp, Homo sapiens
  source 1..20: mol_type = genomic DNA
cggaaaacaaaccctgaagt

SEQ ID NO: 1792 - DNA, 20 bp, Homo sapiens
  source 1..20: mol_type = genomic DNA
acctgcatattgagccatac

SEQ ID NO: 1793 - DNA, 21 bp, Homo sapiens
  source 1..21: mol_type = genomic DNA
tgttctttcacttttagcccc

SEQ ID NO: 1794 - DNA, 21 bp, Homo sapiens
  source 1..21: mol_type = genomic DNA
tttctagaaccctcagcaact

SEQ ID NO: 1795 - DNA, 21 bp, Homo sapiens
  source 1..21: mol_type = genomic DNA
cccccaacagtttttagtggt

SEQ ID NO: 1796 - DNA, 20 bp, Homo sapiens
  source 1..20: mol_type = genomic DNA
aaggcaaaacactccctttt

SEQ ID NO: 1797 - DNA, 22 bp, Homo sapiens
  source 1..22: mol_type = genomic DNA
cagtgattgcctctagaaaagg

SEQ ID NO: 1798 - DNA, 20 bp, Homo sapiens
  source 1..20: mol_type = genomic DNA
ctaagcagattgaagcagct

SEQ ID NO: 1799 - DNA, 20 bp, Homo sapiens
  source 1..20: mol_type = genomic DNA
tgtccccaggcttaagaatc

SEQ ID NO: 1800 - DNA, 20 bp, Homo sapiens
  source 1..20: mol_type = genomic DNA
agccagaataagcaactgtc

SEQ ID NO: 1801 - DNA, 20 bp, Homo sapiens
  source 1..20: mol_type = genomic DNA
tttctcctatcccagcttgc

SEQ ID NO: 1802 - DNA, 21 bp, Homo sapiens
  source 1..21: mol_type = genomic DNA
agtacagaggataacaagggt

SEQ ID NO: 1803 - DNA, 20 bp, Homo sapiens
  source 1..20: mol_type = genomic DNA
ctcccatcagtaccctctct

SEQ ID NO: 1804 - DNA, 21 bp, Homo sapiens
  source 1..21: mol_type = genomic DNA
ggaatgcctaaaccatactgt

SEQ ID NO: 1805 - DNA, 22 bp, Homo sapiens
  source 1..22: mol_type = genomic DNA
agtggtatttcaatgctctacc

SEQ ID NO: 1806 - DNA, 19 bp, Homo sapiens
  source 1..19: mol_type = genomic DNA
gcagtacatcgtcctggaa

SEQ ID NO: 1807 - DNA, 21 bp, Homo sapiens
  source 1..21: mol_type = genomic DNA
cctgagcgagaagaaatttgt

SEQ ID NO: 1808 - DNA, 21 bp, Homo sapiens
  source 1..21: mol_type = genomic DNA
ggaactgaacaagaagtggag

SEQ ID NO: 1809 - DNA, 20 bp, Homo sapiens
  source 1..20: mol_type = genomic DNA
acctactcttattccgcact

SEQ ID NO: 1810 - DNA, 20 bp, Homo sapiens
  source 1..20: mol_type = genomic DNA
tgacagcctctctcttcaat

SEQ ID NO: 1811 - DNA, 18 bp, Homo sapiens
  source 1..18: mol_type = genomic DNA
aaaaaaaaaaaaaaaaaa

SEQ ID NO: 1812 - DNA, 20 bp, Homo sapiens
  source 1..20: mol_type = genomic DNA
gctgtttttctgtgtgcttc

SEQ ID NO: 1813 - DNA, 20 bp, Homo sapiens
  source 1..20: mol_type = genomic DNA
atgtatttcctttagcgccc

SEQ ID NO: 1814 - DNA, 20 bp, Homo sapiens
  source 1..20: mol_type = genomic DNA
aattttgcaagacttccggt

SEQ ID NO: 1815 - DNA, 20 bp, Homo sapiens
  source 1..20: mol_type = genomic DNA
tcccagttgtgaacatttgc

SEQ ID NO: 1816 - DNA, 21 bp, Homo sapiens
  source 1..21: mol_type = genomic DNA
atgggtttttgcacagatgac

SEQ ID NO: 1817 - DNA, 19 bp, Homo sapiens
  source 1..19: mol_type = genomic DNA
gggagtcagaaggaggtca

SEQ ID NO: 1818 - DNA, 21 bp, Homo sapiens
  source 1..21: mol_type = genomic DNA
cctctttttgcatgaacctga

SEQ ID NO: 1819 - DNA, 20 bp, Homo sapiens
  source 1..20: mol_type = genomic DNA
ccttaccctttccactcaga

SEQ ID NO: 1820 - DNA, 21 bp, Homo sapiens
  source 1..21: mol_type = genomic DNA
gactggtataatcttgccgtg

SEQ ID NO: 1821 - DNA, 21 bp, Homo sapiens
  source 1..21: mol_type = genomic DNA
tgtctgcatcttgatctctgg

SEQ ID NO: 1822 - DNA, 19 bp, Homo sapiens
  source 1..19: mol_type = genomic DNA
ggttccacagcatttgagc

SEQ ID NO: 1823 - DNA, 20 bp, Homo sapiens
  source 1..20: mol_type = genomic DNA
aggagcccttaactatggtg

SEQ ID NO: 1824 - DNA, 20 bp, Homo sapiens
  source 1..20: mol_type = genomic DNA
tggcttgggtattgcagata

SEQ ID NO: 1825 - DNA, 20 bp, Homo sapiens
  source 1..20: mol_type = genomic DNA
ggggacagtagaagatgagt

SEQ ID NO: 1826 - DNA, 20 bp, Homo sapiens
  source 1..20: mol_type = genomic DNA
agttgtttctggacggactt

SEQ ID NO: 1827 - DNA, 21 bp, Homo sapiens
  source 1..21: mol_type = genomic DNA
agaatttccctgtccatacca

SEQ ID NO: 1828 - DNA, 20 bp, Homo sapiens
  source 1..20: mol_type = genomic DNA
agtgagtgaacttgccatca

SEQ ID NO: 1829 - DNA, 20 bp, Homo sapiens
  source 1..20: mol_type = genomic DNA
ggcttttctctgcactgatt

SEQ ID NO: 1830 - DNA, 21 bp, Homo sapiens
  source 1..21: mol_type = genomic DNA
gcaaaggaaacaggctaacta

SEQ ID NO: 1831 - DNA, 21 bp, Homo sapiens
  source 1..21: mol_type = genomic DNA
atggcagctgaatcgatatct

SEQ ID NO: 1832 - DNA, 21 bp, Homo sapiens
  source 1..21: mol_type = genomic DNA
taggtgatgggcaaattctca

SEQ ID NO: 1833 - DNA, 22 bp, Homo sapiens
  source 1..22: mol_type = genomic DNA
gaaatgccttcccacttacaat

SEQ ID NO: 1834 - DNA, 21 bp, Homo sapiens
  source 1..21: mol_type = genomic DNA
attggcaaatgtacctgaagc

SEQ ID NO: 1835 - DNA, 21 bp, Homo sapiens
  source 1..21: mol_type = genomic DNA
caatgattgctcttgtgccaa

SEQ ID NO: 1836 - DNA, 21 bp, Homo sapiens
  source 1..21: mol_type = genomic DNA
agctgtcctcctctccatata

SEQ ID NO: 1837 - DNA, 21 bp, Homo sapiens
  source 1..21: mol_type = genomic DNA
ggcgttcaagttactcgattg

SEQ ID NO: 1838 - DNA, 21 bp, Homo sapiens
  source 1..21: mol_type = genomic DNA
tagtgactagctttggagagt

SEQ ID NO: 1839 - DNA, 22 bp, Homo sapiens
  source 1..22: mol_type = genomic DNA
agccaatgatcccttatgactt

SEQ ID NO: 1840 - DNA, 21 bp, Homo sapiens
  source 1..21: mol_type = genomic DNA
aactaaactggtaggcaatcg

SEQ ID NO: 1841 - DNA, 21 bp, Homo sapiens
  source 1..21: mol_type = genomic DNA
caatcagaccacaggaaggaa

SEQ ID NO: 1842 - DNA, 21 bp, Homo sapiens
  source 1..21: mol_type = genomic DNA
gatgtgtttattgcctgtggt

SEQ ID NO: 1843 - DNA, 21 bp, Homo sapiens
  source 1..21: mol_type = genomic DNA
gctcctttcatagtttcaggg

SEQ ID NO: 1844 - DNA, 22 bp, Homo sapiens
  source 1..22: mol_type = genomic DNA
acacactgcagttctcactata

SEQ ID NO: 1845 - DNA, 21 bp, Homo sapiens
  source 1..21: mol_type = genomic DNA
tgaatcaagtgacatgacagc

SEQ ID NO: 1846 - DNA, 21 bp, Homo sapiens
  source 1..21: mol_type = genomic DNA
ttcttacagtcctcagcactt

SEQ ID NO: 1847 - DNA, 21 bp, Homo sapiens
  source 1..21: mol_type = genomic DNA
ccactaggctgcactaatgta

SEQ ID NO: 1848 - DNA, 22 bp, Homo sapiens
  source 1..22: mol_type = genomic DNA
cactagcttctgtaactgtgtg

SEQ ID NO: 1849 - DNA, 21 bp, Homo sapiens
  source 1..21: mol_type = genomic DNA
gtctcacactgctcatttcca

SEQ ID NO: 1850 - DNA, 21 bp, Homo sapiens
  source 1..21: mol_type = genomic DNA
cactagggttcatcagctgtt

SEQ ID NO: 1851 - DNA, 21 bp, Homo sapiens
  source 1..21: mol_type = genomic DNA
caaccaacattagagtgaccc

SEQ ID NO: 1852 - DNA, 21 bp, Homo sapiens
  source 1..21: mol_type = genomic DNA
gctggttgagagagagagaga

SEQ ID NO: 1853 - DNA, 21 bp, Homo sapiens
  source 1..21: mol_type = genomic DNA
acaccagccgaatacagattt

SEQ ID NO: 1854 - DNA, 21 bp, Homo sapiens
  source 1..21: mol_type = genomic DNA
tgcttcatacctttctgcttc

SEQ ID NO: 1855 - DNA, 21 bp, Homo sapiens
  source 1..21: mol_type = genomic DNA
atttcccatgcctttcaactc

SEQ ID NO: 1856 - DNA, 21 bp, Homo sapiens
  source 1..21: mol_type = genomic DNA
tctctcagtaggcgtctttaa

SEQ ID NO: 1857 - DNA, 20 bp, Homo sapiens
  source 1..20: mol_type = genomic DNA
tgactgctacgctagacttg

SEQ ID NO: 1858 - DNA, 20 bp, Homo sapiens
  source 1..20: mol_type = genomic DNA
ggatagaggaaacccaggtg

SEQ ID NO: 1859 - DNA, 21 bp, Homo sapiens
  source 1..21: mol_type = genomic DNA
ggctctttcaaagtatccagg

SEQ ID NO: 1860 - DNA, 22 bp, Homo sapiens
  source 1..22: mol_type = genomic DNA
agactttctttgttgccttcag

SEQ ID NO: 1861 - DNA, 20 bp, Homo sapiens
  source 1..20: mol_type = genomic DNA
gcctcaacaattcagtccac

SEQ ID NO: 1862 - DNA, 22 bp, Homo sapiens
  source 1..22: mol_type = genomic DNA
cataagttgctggaagagaaca

SEQ ID NO: 1863 - DNA, 21 bp, Homo sapiens
  source 1..21: mol_type = genomic DNA
tcgactgctttaagtgaagga

SEQ ID NO: 1864 - DNA, 22 bp, Homo sapiens
  source 1..22: mol_type = genomic DNA
accagtgattagtgtttctcct

SEQ ID NO: 1865 - DNA, 21 bp, Homo sapiens
  source 1..21: mol_type = genomic DNA
caagacacacacaaacacaca

SEQ ID NO: 1866 - DNA, 21 bp, Homo sapiens
  source 1..21: mol_type = genomic DNA
ggtaagagttgccctaatgtc

SEQ ID NO: 1867 - DNA, 20 bp, Homo sapiens
  source 1..20: mol_type = genomic DNA
gcttggcttctcacaaatgt

SEQ ID NO: 1868 - DNA, 20 bp, Homo sapiens
  source 1..20: mol_type = genomic DNA
gtttgccagtagaaatggga

SEQ ID NO: 1869 - DNA, 20 bp, Homo sapiens
  source 1..20: mol_type = genomic DNA
gtaaagtgttcagaggacgg

SEQ ID NO: 1870 - DNA, 21 bp, Homo sapiens
  source 1..21: mol_type = genomic DNA
actagggagaagaattggcag

SEQ ID NO: 1871 - DNA, 20 bp, Homo sapiens
  source 1..20: mol_type = genomic DNA
ccagttcattccagcttcca

SEQ ID NO: 1872 - DNA, 22 bp, Homo sapiens
  source 1..22: mol_type = genomic DNA
gatcgccaacctgttttataag

SEQ ID NO: 1873 - DNA, 21 bp, Homo sapiens
  source 1..21: mol_type = genomic DNA
gctgtcaaagtggagataacc

SEQ ID NO: 1874 - DNA, 21 bp, Homo sapiens
  source 1..21: mol_type = genomic DNA
aacgcttccatccacctaatt

SEQ ID NO: 1875 - DNA, 21 bp, Homo sapiens
  source 1..21: mol_type = genomic DNA
acctgcctgtcttaccattaa

SEQ ID NO: 1876 - DNA, 23 bp, Homo sapiens
  source 1..23: mol_type = genomic DNA
gatactttcctttctccagatct

SEQ ID NO: 1877 - DNA, 20 bp, Homo sapiens
  source 1..20: mol_type = genomic DNA
ggccgcagtttttgatttag

SEQ ID NO: 1878 - DNA, 19 bp, Homo sapiens
  source 1..19: mol_type = genomic DNA
tgggaaggacggtttgtta

SEQ ID NO: 1879 - DNA, 20 bp, Homo sapiens
  source 1..20: mol_type = genomic DNA
tgaatcatgctgtggagaac

SEQ ID NO: 1880 - DNA, 20 bp, Homo sapiens
  source 1..20: mol_type = genomic DNA
atagaagaggtacccagcaa

SEQ ID NO: 1881 - DNA, 20 bp, Homo sapiens
  source 1..20: mol_type = genomic DNA
ccctgactatgctaagttgc

SEQ ID NO: 1882 - DNA, 20 bp, Homo sapiens
  source 1..20: mol_type = genomic DNA
tgcaagcaaaatgaaaccag

SEQ ID NO: 1883 - DNA, 18 bp, Homo sapiens
  source 1..18: mol_type = genomic DNA
aaaaaaaaaaaaaaaaaa

SEQ ID NO: 1884 - DNA, 19 bp, Homo sapiens
  source 1..19: mol_type = genomic DNA
cagctgctccttctttagc

SEQ ID NO: 1885 - DNA, 20 bp, Homo sapiens
  source 1..20: mol_type = genomic DNA
tatactgccaaaggtgacct

SEQ ID NO: 1886 - DNA, 21 bp, Homo sapiens
  source 1..21: mol_type = genomic DNA
gaagcataatgagaacctcca

SEQ ID NO: 1887 - DNA, 20 bp, Homo sapiens
  source 1..20: mol_type = genomic DNA
aacccaacttgcagacaatc

SEQ ID NO: 1888 - DNA, 20 bp, Homo sapiens
  source 1..20: mol_type = genomic DNA
atctgtttgctgtgtcagaa

SEQ ID NO: 1889 - DNA, 23 bp, Homo sapiens
  source 1..23: mol_type = genomic DNA
tccagatatattcaaaagggaga

SEQ ID NO: 1890 - DNA, 20 bp, Homo sapiens
  source 1..20: mol_type = genomic DNA
aggtttttatcaaagcccca

SEQ ID NO: 1891 - DNA, 21 bp, Homo sapiens
  source 1..21: mol_type = genomic DNA
gggacttgatgttctaagcaa

SEQ ID NO: 1892 - DNA, 20 bp, Homo sapiens
  source 1..20: mol_type = genomic DNA
cctacatgatacgcacagtc

SEQ ID NO: 1893 - DNA, 18 bp, Homo sapiens
  source 1..18: mol_type = genomic DNA
aaaaaaaaaaaaaaaaaa

SEQ ID NO: 1894 - DNA, 20 bp, Homo sapiens
  source 1..20: mol_type = genomic DNA
gtttttctctacccagcaca

SEQ ID NO: 1895 - DNA, 21 bp, Homo sapiens
  source 1..21: mol_type = genomic DNA
ctctaatttgccaccctcttt

SEQ ID NO: 1896 - DNA, 20 bp, Homo sapiens
  source 1..20: mol_type = genomic DNA
gaacgctaaagcttttccca

SEQ ID NO: 1897 - DNA, 20 bp, Homo sapiens
  source 1..20: mol_type = genomic DNA
tctttctcctgccaagtaga

SEQ ID NO: 1898 - DNA, 20 bp, Homo sapiens
  source 1..20: mol_type = genomic DNA
ataacactgtccttctgggc

SEQ ID NO: 1899 - DNA, 20 bp, Homo sapiens
  source 1..20: mol_type = genomic DNA
gagcctactctctgatacga

SEQ ID NO: 1900 - DNA, 21 bp, Homo sapiens
  source 1..21: mol_type = genomic DNA
ccagttgttcacttctctgat

SEQ ID NO: 1901 - DNA, 20 bp, Homo sapiens
  source 1..20: mol_type = genomic DNA
gccttaaaaccaaactgtgt

SEQ ID NO: 1902 - DNA, 20 bp, Homo sapiens
  source 1..20: mol_type = genomic DNA
ctggacttcaatcacccaag

SEQ ID NO: 1903 - DNA, 20 bp, Homo sapiens
  source 1..20: mol_type = genomic DNA
tgaacaaattgctgtgctga

SEQ ID NO: 1904 - DNA, 20 bp, Homo sapiens
  source 1..20: mol_type = genomic DNA
ccccctaaatgaaagtggtc

SEQ ID NO: 1905 - DNA, 18 bp, Homo sapiens
  source 1..18: mol_type = genomic DNA
aaaaaaaaaaaaaaaaaa

SEQ ID NO: 1906 - DNA, 20 bp, Homo sapiens
  source 1..20: mol_type = genomic DNA
tgagtgcttggaattttgca

SEQ ID NO: 1907 - DNA, 20 bp, Homo sapiens
  source 1..20: mol_type = genomic DNA
ggttggctacttcatggtac

SEQ ID NO: 1908 - DNA, 20 bp, Homo sapiens
  source 1..20: mol_type = genomic DNA
tcactgcattcctagaacct

SEQ ID NO: 1909 - DNA, 20 bp, Homo sapiens
  source 1..20: mol_type = genomic DNA
ataactcaggcaaaatgggg

SEQ ID NO: 1910 - DNA, 20 bp, Homo sapiens
  source 1..20: mol_type = genomic DNA
ccttctgctctcactttacg

SEQ ID NO: 1911 - DNA, 20 bp, Homo sapiens
  source 1..20: mol_type = genomic DNA
ggatactagcagaggtggag

SEQ ID NO: 1912 - DNA, 21 bp, Homo sapiens
  source 1..21: mol_type = genomic DNA
tgtacacaatatgccaggaac

SEQ ID NO: 1913 - DNA, 20 bp, Homo sapiens
  source 1..20: mol_type = genomic DNA
gcacttgagttatgggactt

SEQ ID NO: 1914 - DNA, 23 bp, Homo sapiens
  source 1..23: mol_type = genomic DNA
tgtgatatgtagtgtgtatcagt

SEQ ID NO: 1915 - DNA, 20 bp, Homo sapiens
  source 1..20: mol_type = genomic DNA
gaatgtgttcaaaggagggt

SEQ ID NO: 1916 - DNA, 20 bp, Homo sapiens
  source 1..20: mol_type = genomic DNA
gatgaaggggattacgggaa

SEQ ID NO: 1917 - DNA, 20 bp, Homo sapiens
  source 1..20: mol_type = genomic DNA
tttaggaagcagcacaagaa

SEQ ID NO: 1918 - DNA, 18 bp, Homo sapiens
  source 1..18: mol_type = genomic DNA
gagggtgctggggttatc

SEQ ID NO: 1919 - DNA, 20 bp, Homo sapiens
  source 1..20: mol_type = genomic DNA
cccgaaagcacttacctttt

SEQ ID NO: 1920 - DNA, 20 bp, Homo sapiens
  source 1..20: mol_type = genomic DNA
ttcatgagctgcaatgtgtt

SEQ ID NO: 1921 - DNA, 20 bp, Homo sapiens
  source 1..20: mol_type = genomic DNA
tgctatgaaaagagggacca

SEQ ID NO: 1922 - DNA, 20 bp, Homo sapiens
  source 1..20: mol_type = genomic DNA
gtcctggatctacacgtgaa

SEQ ID NO: 1923 - DNA, 20 bp, Homo sapiens
  source 1..20: mol_type = genomic DNA
gtaaatctgtgtgccagcaa

SEQ ID NO: 1924 - DNA, 20 bp, Homo sapiens
  source 1..20: mol_type = genomic DNA
taaaagaggcgtgtggaaaa

SEQ ID NO: 1925 - DNA, 20 bp, Homo sapiens
  source 1..20: mol_type = genomic DNA
ccagtagcttgtgatgtgta

SEQ ID NO: 1926 - DNA, 20 bp, Homo sapiens
  source 1..20: mol_type = genomic DNA
tacaggcctctgaaagatga

SEQ ID NO: 1927 - DNA, 20 bp, Homo sapiens
  source 1..20: mol_type = genomic DNA
agagcatgctagacgtcttt

SEQ ID NO: 1928 - DNA, 20 bp, Homo sapiens
  source 1..20: mol_type = genomic DNA
ctgggctgtaattaaggctc

SEQ ID NO: 1929 - DNA, 20 bp, Homo sapiens
  source 1..20: mol_type = genomic DNA
aacacctgcacactttgaaa

SEQ ID NO: 1930 - DNA, 20 bp, Homo sapiens
  source 1..20: mol_type = genomic DNA
aatgaactttgtgggctgaa

SEQ ID NO: 1931 - DNA, 20 bp, Homo sapiens
  source 1..20: mol_type = genomic DNA
ccacactctcactggttcta

SEQ ID NO: 1932 - DNA, 20 bp, Homo sapiens
  source 1..20: mol_type = genomic DNA
cacagtggatacctcaggaa

SEQ ID NO: 1933 - DNA, 20 bp, Homo sapiens
  source 1..20: mol_type = genomic DNA
ccaacacaggaggaactttt

SEQ ID NO: 1934 - DNA, 22 bp, Homo sapiens
  source 1..22: mol_type = genomic DNA
gagaaaagccaacaaaaatgtg

SEQ ID NO: 1935 - DNA, 22 bp, Homo sapiens
  source 1..22: mol_type = genomic DNA
tgtcattactagaagcaccttt

SEQ ID NO: 1936 - DNA, 23 bp, Homo sapiens
  source 1..23: mol_type = genomic DNA
tggtgtgagttcaggagggttta

SEQ ID NO: 1937 - DNA, 20 bp, Homo sapiens
  source 1..20: mol_type = genomic DNA
accatttctgacagaacaga

SEQ ID NO: 1938 - DNA, 20 bp, Homo sapiens
  source 1..20: mol_type = genomic DNA
tgatgcttaaacacatgcct

SEQ ID NO: 1939 - DNA, 20 bp, Homo sapiens
  source 1..20: mol_type = genomic DNA
aagggatatgcagcttgttc

SEQ ID NO: 1940 - DNA, 18 bp, Homo sapiens
  source 1..18: mol_type = genomic DNA
aaaaaaaaaaaaaaaaaa

SEQ ID NO: 1941 - DNA, 22 bp, Homo sapiens
  source 1..22: mol_type = genomic DNA
gttgtcattcaaatgtcaccac

SEQ ID NO: 1942 - DNA, 19 bp, Homo sapiens
  source 1..19: mol_type = genomic DNA
ctcagattccagagccctc

SEQ ID NO: 1943 - DNA, 20 bp, Homo sapiens
  source 1..20: mol_type = genomic DNA
acattgctagcagcttttgt

SEQ ID NO: 1944 - DNA, 21 bp, Homo sapiens
  source 1..21: mol_type = genomic DNA
acttgccaagaacagtatctg

SEQ ID NO: 1945 - DNA, 20 bp, Homo sapiens
  source 1..20: mol_type = genomic DNA
ttccttcttccaggtgaaca

SEQ ID NO: 1946 - DNA, 20 bp, Homo sapiens
  source 1..20: mol_type = genomic DNA
tgtttctccttcatctggtc

SEQ ID NO: 1947 - DNA, 20 bp, Homo sapiens
  source 1..20: mol_type = genomic DNA
tgtcaccttgcagatacagg

SEQ ID NO: 1948 - DNA, 20 bp, Homo sapiens
  source 1..20: mol_type = genomic DNA
attgttcacagggtcaagtc

SEQ ID NO: 1949 - DNA, 20 bp, Homo sapiens
  source 1..20: mol_type = genomic DNA
atgagccaggagaatcatca

SEQ ID NO: 1950 - DNA, 20 bp, Homo sapiens
  source 1..20: mol_type = genomic DNA
catcatttcaaaggggctca

SEQ ID NO: 1951 - DNA, 20 bp, Homo sapiens
  source 1..20: mol_type = genomic DNA
tcttctctaacacccactcc

SEQ ID NO: 1952 - DNA, 20 bp, Homo sapiens
  source 1..20: mol_type = genomic DNA
acccttaccaaagtagcatc

SEQ ID NO: 1953 - DNA, 20 bp, Homo sapiens
  source 1..20: mol_type = genomic DNA
atcacgacgccttgtttatt

SEQ ID NO: 1954 - DNA, 20 bp, Homo sapiens
  source 1..20: mol_type = genomic DNA
actttcctgccaacaatctc

SEQ ID NO: 1955 - DNA, 20 bp, Homo sapiens
  source 1..20: mol_type = genomic DNA
ttgatagttgcatctgggga

SEQ ID NO: 1956 - DNA, 22 bp, Homo sapiens
  source 1..22: mol_type = genomic DNA
tttgttaactaacgtgattcca

SEQ ID NO: 1957 - DNA, 20 bp, Homo sapiens
  source 1..20: mol_type = genomic DNA
cccactctccatgtgttctt

SEQ ID NO: 1958 - DNA, 20 bp, Homo sapiens
  source 1..20: mol_type = genomic DNA
tcctgcttcaactcaatacg

SEQ ID NO: 1959 - DNA, 20 bp, Homo sapiens
  source 1..20: mol_type = genomic DNA
acccctcattttcgtatgtc

SEQ ID NO: 1960 - DNA, 20 bp, Homo sapiens
  source 1..20: mol_type = genomic DNA
acagttatggaggaattgcg

SEQ ID NO: 1961 - DNA, 22 bp, Homo sapiens
  source 1..22: mol_type = genomic DNA
tcaaacctcttttatctgtccc

SEQ ID NO: 1962 - DNA, 20 bp, Homo sapiens
  source 1..20: mol_type = genomic DNA
atttcacgtaacactctggt

SEQ ID NO: 1963 - DNA, 21 bp, Homo sapiens
  source 1..21: mol_type = genomic DNA
ctctggcaaaactttctggat

SEQ ID NO: 1964 - DNA, 19 bp, Homo sapiens
  source 1..19: mol_type = genomic DNA
gcttctcatgctcacactg

SEQ ID NO: 1965 - DNA, 21 bp, Homo sapiens
  source 1..21: mol_type = genomic DNA
aatatgacttgcccttttgaa

SEQ ID NO: 1966 - DNA, 19 bp, Homo sapiens
  source 1..19: mol_type = genomic DNA
tcacagccagttacacaga

SEQ ID NO: 1967 - DNA, 20 bp, Homo sapiens
  source 1..20: mol_type = genomic DNA
ctacagtgcagaagagtccc

SEQ ID NO: 1968 - DNA, 20 bp, Homo sapiens
  source 1..20: mol_type = genomic DNA
ttggtttcatgtggctttga

SEQ ID NO: 1969 - DNA, 20 bp, Homo sapiens
  source 1..20: mol_type = genomic DNA
tccttctccccaactttctt

SEQ ID NO: 1970 - DNA, 21 bp, Homo sapiens
  source 1..21: mol_type = genomic DNA
ctttagattccagggctcttg

SEQ ID NO: 1971 - DNA, 20 bp, Homo sapiens
  source 1..20: mol_type = genomic DNA
tgaaagcgtgaaaatcagct

SEQ ID NO: 1972 - DNA, 20 bp, Homo sapiens
  source 1..20: mol_type = genomic DNA
actcgatccctaggtaatgt

SEQ ID NO: 1973 - DNA, 20 bp, Homo sapiens
  source 1..20: mol_type = genomic DNA
acaagtgggtagggatgttc

SEQ ID NO: 1974 - DNA, 20 bp, Homo sapiens
  source 1..20: mol_type = genomic DNA
gcacaagttttcagggaatg

SEQ ID NO: 1975 - DNA, 20 bp, Homo sapiens
  source 1..20: mol_type = genomic DNA
gtggaaagtctcgtcagaat

SEQ ID NO: 1976 - DNA, 20 bp, Homo sapiens
  source 1..20: mol_type = genomic DNA
tccacctctgagcataacat

SEQ ID NO: 1977 - DNA, 18 bp, Homo sapiens
  source 1..18: mol_type = genomic DNA
aaaaaaaaaaaaaaaaaa

SEQ ID NO: 1978 - DNA, 18 bp, Homo sapiens
  source 1..18: mol_type = genomic DNA
aaaaaaaaaaaaaaaaaa

SEQ ID NO: 1979 - DNA, 20 bp, Homo sapiens
  source 1..20: mol_type = genomic DNA
ccatcccacttctccagata

SEQ ID NO: 1980 - DNA, 20 bp, Homo sapiens
  source 1..20: mol_type = genomic DNA
ccaccttcctgcttaaagaa

SEQ ID NO: 1981 - DNA, 20 bp, Homo sapiens
  source 1..20: mol_type = genomic DNA
ctccttacttgcactgagtt

SEQ ID NO: 1982 - DNA, 20 bp, Homo sapiens
  source 1..20: mol_type = genomic DNA
gggaaaacttacgggaactt

SEQ ID NO: 1983 - DNA, 22 bp, Homo sapiens
  source 1..22: mol_type = genomic DNA
tagaaatgtttagggtgcatga

SEQ ID NO: 1984 - DNA, 20 bp, Homo sapiens
  source 1..20: mol_type = genomic DNA
tacccctcttttccatctgc

SEQ ID NO: 1985 - DNA, 20 bp, Homo sapiens
  source 1..20: mol_type = genomic DNA
gcattttgacaggaaagtgg

SEQ ID NO: 1986 - DNA, 20 bp, Homo sapiens
  source 1..20: mol_type = genomic DNA
tagggccacagtttctcaat

SEQ ID NO: 1987 - DNA, 20 bp, Homo sapiens
  source 1..20: mol_type = genomic DNA
gaatgagaaatctggcagga

SEQ ID NO: 1988 - DNA, 20 bp, Homo sapiens
  source 1..20: mol_type = genomic DNA
tcagatgcctgatgaccata

SEQ ID NO: 1989 - DNA, 20 bp, Homo sapiens
  source 1..20: mol_type = genomic DNA
aatatgcagtgggtaggagc

SEQ ID NO: 1990 - DNA, 20 bp, Homo sapiens
  source 1..20: mol_type = genomic DNA
gacaacagctgacttccatt

SEQ ID NO: 1991 - DNA, 20 bp, Homo sapiens
  source 1..20: mol_type = genomic DNA
cactctctggaacaaacaca

SEQ ID NO: 1992 - DNA, 20 bp, Homo sapiens
  source 1..20: mol_type = genomic DNA
gttttgaggcggtttcatga

SEQ ID NO: 1993 - DNA, 18 bp, Homo sapiens
  source 1..18: mol_type = genomic DNA
aaaaaaaaaaaaaaaaaa

SEQ ID NO: 1994 - DNA, 20 bp, Homo sapiens
  source 1..20: mol_type = genomic DNA
gaacacctcaaagttgctca

SEQ ID NO: 1995 - DNA, 20 bp, Homo sapiens
  source 1..20: mol_type = genomic DNA
aagaagcaaggacaaggatg

SEQ ID NO: 1996 - DNA, 20 bp, Homo sapiens
  source 1..20: mol_type = genomic DNA
gaaacaaccaccacaacaaa

SEQ ID NO: 1997 - DNA, 20 bp, Homo sapiens
  source 1..20: mol_type = genomic DNA
ccaccatgtttacaccgttt

SEQ ID NO: 1998 - DNA, 20 bp, Homo sapiens
  source 1..20: mol_type = genomic DNA
tttacccatgaattgctgca

SEQ ID NO: 1999 - DNA, 20 bp, Homo sapiens
  source 1..20: mol_type = genomic DNA
agtttgcatttgttcaggga

SEQ ID NO: 2000 - DNA, 20 bp, Homo sapiens
  source 1..20: mol_type = genomic DNA
ttcggatggctttgattgtc

SEQ ID NO: 2001 - DNA, 21 bp, Homo sapiens
  source 1..21: mol_type = genomic DNA
cattgtaaattaaacggcctc

SEQ ID NO: 2002 - DNA, 20 bp, Homo sapiens
  source 1..20: mol_type = genomic DNA
ctaatgcaagctgcttctct

SEQ ID NO: 2003 - DNA, 20 bp, Homo sapiens
  source 1..20: mol_type = genomic DNA
tgtctagtggtaatctgggg

SEQ ID NO: 2004 - DNA, 20 bp, Homo sapiens
  source 1..20: mol_type = genomic DNA
tctggacagtggagttgaaa

SEQ ID NO: 2005 - DNA, 18 bp, Homo sapiens
  source 1..18: mol_type = genomic DNA
aaaaaaaaaaaaaaaaaa

SEQ ID NO: 2006 - DNA, 20 bp, Homo sapiens
  source 1..20: mol_type = genomic DNA
aggagagacataactggtct

SEQ ID NO: 2007 - DNA, 20 bp, Homo sapiens
  source 1..20: mol_type = genomic DNA
attgcaatgtctgtggatgt

SEQ ID NO: 2008 - DNA, 19 bp, Homo sapiens
  source 1..19: mol_type = genomic DNA
aagaagttgaggtagcacg

SEQ ID NO: 2009 - DNA, 20 bp, Homo sapiens
  source 1..20: mol_type = genomic DNA
agtgtcctttcctccagttc

SEQ ID NO: 2010 - DNA, 21 bp, Homo sapiens
  source 1..21: mol_type = genomic DNA
ttgaacctgaaaggaactgtg

SEQ ID NO: 2011 - DNA, 20 bp, Homo sapiens
  source 1..20: mol_type = genomic DNA
gctcaatcacctgttccctt

SEQ ID NO: 2012 - DNA, 21 bp, Homo sapiens
  source 1..21: mol_type = genomic DNA
cattgaagctcactctaaggg

SEQ ID NO: 2013 - DNA, 20 bp, Homo sapiens
  source 1..20: mol_type = genomic DNA
ctaaagtttgggttaggggt

SEQ ID NO: 2014 - DNA, 20 bp, Homo sapiens
  source 1..20: mol_type = genomic DNA
tgccttacattttctgtggg

SEQ ID NO: 2015 - DNA, 20 bp, Homo sapiens
  source 1..20: mol_type = genomic DNA
gccataagatttccccactc

SEQ ID NO: 2016 - DNA, 21 bp, Homo sapiens
  source 1..21: mol_type = genomic DNA
acaaagcaagaggatgaaaca

SEQ ID NO: 2017 - DNA, 20 bp, Homo sapiens
  source 1..20: mol_type = genomic DNA
caaagcaccatcaacactta

SEQ ID NO: 2018 - DNA, 20 bp, Homo sapiens
  source 1..20: mol_type = genomic DNA
cactgcaactcctagaatga

SEQ ID NO: 2019 - DNA, 20 bp, Homo sapiens
  source 1..20: mol_type = genomic DNA
tgtggggaaattgctgttta

SEQ ID NO: 2020 - DNA, 20 bp, Homo sapiens
  source 1..20: mol_type = genomic DNA
gtatgggcagctgtaacttg

SEQ ID NO: 2021 - DNA, 20 bp, Homo sapiens
  source 1..20: mol_type = genomic DNA
tcacaagccactgaaaatgt

SEQ ID NO: 2022 - DNA, 21 bp, Homo sapiens
  source 1..21: mol_type = genomic DNA
tgtatgttaagctagccaaca

SEQ ID NO: 2023 - DNA, 20 bp, Homo sapiens
  source 1..20: mol_type = genomic DNA
tgtgttattgaactttgcca

SEQ ID NO: 2024 - DNA, 20 bp, Homo sapiens
  source 1..20: mol_type = genomic DNA
ttcatccctacctcatcacc

SEQ ID NO: 2025 - DNA, 21 bp, Homo sapiens
  source 1..21: mol_type = genomic DNA
agatcacttttggctgtaacc

SEQ ID NO: 2026 - DNA, 20 bp, Homo sapiens
  source 1..20: mol_type = genomic DNA
caagtgacaatctcagccaa

SEQ ID NO: 2027 - DNA, 20 bp, Homo sapiens
  source 1..20: mol_type = genomic DNA
gcattttcagatggttccct

SEQ ID NO: 2028 - DNA, 20 bp, Homo sapiens
  source 1..20: mol_type = genomic DNA
atggagagtttgagtggagt

SEQ ID NO: 2029 - DNA, 22 bp, Homo sapiens
  source 1..22: mol_type = genomic DNA
ctgccactgggtttatagaaaa

SEQ ID NO: 2030 - DNA, 20 bp, Homo sapiens
  source 1..20: mol_type = genomic DNA
acacctttactcctgtggat

SEQ ID NO: 2031 - DNA, 20 bp, Homo sapiens
  source 1..20: mol_type = genomic DNA
gatgtagggccttatccaca

SEQ ID NO: 2032 - DNA, 20 bp, Homo sapiens
  source 1..20: mol_type = genomic DNA
agcttggtgatcttcaaaca

SEQ ID NO: 2033 - DNA, 20 bp, Homo sapiens
  source 1..20: mol_type = genomic DNA
tgaaatggtgggtaatgctc

SEQ ID NO: 2034 - DNA, 20 bp, Homo sapiens
  source 1..20: mol_type = genomic DNA
catgcaagttcacgaggtta

SEQ ID NO: 2035 - DNA, 20 bp, Homo sapiens
  source 1..20: mol_type = genomic DNA
agtctgaggaagaagcaact

SEQ ID NO: 2036 - DNA, 20 bp, Homo sapiens
  source 1..20: mol_type = genomic DNA
gagtccaatcttttcccaca

SEQ ID NO: 2037 - DNA, 20 bp, Homo sapiens
  source 1..20: mol_type = genomic DNA
tccactgcgttcttatcctt

SEQ ID NO: 2038 - DNA, 20 bp, Homo sapiens
  source 1..20: mol_type = genomic DNA
ggacagaacagctacaaagg

SEQ ID NO: 2039 - DNA, 20 bp, Homo sapiens
  source 1..20: mol_type = genomic DNA
ctggcttgtgaattagaggg

SEQ ID NO: 2040 - DNA, 19 bp, Homo sapiens
  source 1..19: mol_type = genomic DNA
gtaagatggtgggcaggat

SEQ ID NO: 2041 - DNA, 20 bp, Homo sapiens
  source 1..20: mol_type = genomic DNA
agaagggctcaaaacacatc

SEQ ID NO: 2042 - DNA, 21 bp, Homo sapiens
  source 1..21: mol_type = genomic DNA
tcatgtaggctttctgatttt

SEQ ID NO: 2043 - DNA, 20 bp, Homo sapiens
  source 1..20: mol_type = genomic DNA
tgtagctcttgacctagcaa

SEQ ID NO: 2044 - DNA, 21 bp, Homo sapiens
  source 1..21: mol_type = genomic DNA
taagttcacggtgaagtcaac

SEQ ID NO: 2045 - DNA, 20 bp, Homo sapiens
  source 1..20: mol_type = genomic DNA
gtggcttcaactaactggac

SEQ ID NO: 2046 - DNA, 20 bp, Homo sapiens
  source 1..20: mol_type = genomic DNA
acccgtaagtgtttgagtga

SEQ ID NO: 2047 - DNA, 20 bp, Homo sapiens
  source 1..20: mol_type = genomic DNA
tgtagaagtagggtttgcgt

SEQ ID NO: 2048 - DNA, 20 bp, Homo sapiens
  source 1..20: mol_type = genomic DNA
caggggacatttgaagatgg

SEQ ID NO: 2049 - DNA, 20 bp, Homo sapiens
  source 1..20: mol_type = genomic DNA
gaaattgtgcagtgaaagca

SEQ ID NO: 2050 - DNA, 21 bp, Homo sapiens
  source 1..21: mol_type = genomic DNA
atgtaagaagtgcgttgctta

SEQ ID NO: 2051 - DNA, 21 bp, Homo sapiens
  source 1..21: mol_type = genomic DNA
agatctggaatctgagactcc

SEQ ID NO: 2052 - DNA, 22 bp, Homo sapiens
  source 1..22: mol_type = genomic DNA
tataggataaggtcaagcaggt

SEQ ID NO: 2053 - DNA, 18 bp, Homo sapiens
  source 1..18: mol_type = genomic DNA
aaaaaaaaaaaaaaaaaa

SEQ ID NO: 2054 - DNA, 21 bp, Homo sapiens
  source 1..21: mol_type = genomic DNA
tcagtgaatgaggaatcatgc

SEQ ID NO: 2055 - DNA, 20 bp, Homo sapiens
  source 1..20: mol_type = genomic DNA
ttctcaggagtaccacaagc

SEQ ID NO: 2056 - DNA, 20 bp, Homo sapiens
  source 1..20: mol_type = genomic DNA
ggatgaaacacagaaccatg

SEQ ID NO: 2057 - DNA, 20 bp, Homo sapiens
  source 1..20: mol_type = genomic DNA
cagatccctttcattttgca

SEQ ID NO: 2058 - DNA, 20 bp, Homo sapiens
  source 1..20: mol_type = genomic DNA
ggaaaagtgctcaattaggc

SEQ ID NO: 2059 - DNA, 20 bp, Homo sapiens
  source 1..20: mol_type = genomic DNA
ctggcagttatagtcaccaa

SEQ ID NO: 2060 - DNA, 20 bp, Homo sapiens
  source 1..20: mol_type = genomic DNA
aggaagtccttatgatgcca

SEQ ID NO: 2061 - DNA, 20 bp, Homo sapiens
  source 1..20: mol_type = genomic DNA
gctggtgaagttggagtttt

SEQ ID NO: 2062 - DNA, 20 bp, Homo sapiens
  source 1..20: mol_type = genomic DNA
gctgggtttaagccacatat

SEQ ID NO: 2063 - DNA, 20 bp, Homo sapiens
  source 1..20: mol_type = genomic DNA
tgtagcctaaatagcagcct

SEQ ID NO: 2064 - DNA, 23 bp, Homo sapiens
  source 1..23: mol_type = genomic DNA
aggaattgcttttattttaacca

SEQ ID NO: 2065 - DNA, 20 bp, Homo sapiens
  source 1..20: mol_type = genomic DNA
gctgctttcaggtttttgtg

SEQ ID NO: 2066 - DNA, 20 bp, Homo sapiens
  source 1..20: mol_type = genomic DNA
atggtgcagaaaagagcaat

SEQ ID NO: 2067 - DNA, 20 bp, Homo sapiens
  source 1..20: mol_type = genomic DNA
gtgtggtgccattttctttc

SEQ ID NO: 2068 - DNA, 20 bp, Homo sapiens
  source 1..20: mol_type = genomic DNA
gaacaatactttctccccgg

SEQ ID NO: 2069 - DNA, 20 bp, Homo sapiens
  source 1..20: mol_type = genomic DNA
gaaatggccatgctaggaat

SEQ ID NO: 2070 - DNA, 20 bp, Homo sapiens
  source 1..20: mol_type = genomic DNA
acttccagtaacatggatgc

SEQ ID NO: 2071 - DNA, 20 bp, Homo sapiens
  source 1..20: mol_type = genomic DNA
gaaacacccagacttgtagc

SEQ ID NO: 2072 - DNA, 20 bp, Homo sapiens
  source 1..20: mol_type = genomic DNA
ttaaatctttgtgtgcgtgt

SEQ ID NO: 2073 - DNA, 20 bp, Homo sapiens
  source 1..20: mol_type = genomic DNA
cctccaggaactttgttcag

SEQ ID NO: 2074 - DNA, 20 bp, Homo sapiens
  source 1..20: mol_type = genomic DNA
aaaaaccttcacaaacccca

SEQ ID NO: 2075 - DNA, 20 bp, Homo sapiens
  source 1..20: mol_type = genomic DNA
gagtggatattgtctcgctg

SEQ ID NO: 2076 - DNA, 20 bp, Homo sapiens
  source 1..20: mol_type = genomic DNA
actagcccactaatgttgct

SEQ ID NO: 2077 - DNA, 22 bp, Homo sapiens
  source 1..22: mol_type = genomic DNA
cgattatcagaacagatgaggt

SEQ ID NO: 2078 - DNA, 20 bp, Homo sapiens
  source 1..20: mol_type = genomic DNA
attgcacagctgaaaatcct

SEQ ID NO: 2079 - DNA, 20 bp, Homo sapiens
  source 1..20: mol_type = genomic DNA
ggcacactgaccgtatttat

SEQ ID NO: 2080 - DNA, 20 bp, Homo sapiens
  source 1..20: mol_type = genomic DNA
tggtagtgggtcaggaattt

SEQ ID NO: 2081 - DNA, 20 bp, Homo sapiens
  source 1..20: mol_type = genomic DNA
tctcttgaaaagaaaggcgg

SEQ ID NO: 2082 - DNA, 20 bp, Homo sapiens
  source 1..20: mol_type = genomic DNA
tgaattacacagcaaagccc

SEQ ID NO: 2083 - DNA, 20 bp, Homo sapiens
  source 1..20: mol_type = genomic DNA
ctgccaatgggatcgaattt

SEQ ID NO: 2084 - DNA, 20 bp, Homo sapiens
  source 1..20: mol_type = genomic DNA
gagtgacgctgttcattctt

SEQ ID NO: 2085 - DNA, 20 bp, Homo sapiens
  source 1..20: mol_type = genomic DNA
gatagtaaccgggtgtagca

SEQ ID NO: 2086 - DNA, 18 bp, Homo sapiens
  source 1..18: mol_type = genomic DNA
aaaaaaaaaaaaaaaaaa

SEQ ID NO: 2087 - DNA, 23 bp, Homo sapiens
  source 1..23: mol_type = genomic DNA
tctaataagggattgatggagtt

SEQ ID NO: 2088 - DNA, 20 bp, Homo sapiens
  source 1..20: mol_type = genomic DNA
gggagatttcctgcttgtag

SEQ ID NO: 2089 - DNA, 20 bp, Homo sapiens
  source 1..20: mol_type = genomic DNA
aatccatgcagcttctctct

SEQ ID NO: 2090 - DNA, 20 bp, Homo sapiens
  source 1..20: mol_type = genomic DNA
tgcattgtctctggtttgaa

SEQ ID NO: 2091 - DNA, 20 bp, Homo sapiens
  source 1..20: mol_type = genomic DNA
tcctgaatgcatccttaacc

SEQ ID NO: 2092 - DNA, 20 bp, Homo sapiens
  source 1..20: mol_type = genomic DNA
tgggaaaggtgagaaggatt

SEQ ID NO: 2093 - DNA, 20 bp, Homo sapiens
  source 1..20: mol_type = genomic DNA
ttcgggacccatacctaaaa

SEQ ID NO: 2094 - DNA, 20 bp, Homo sapiens
  source 1..20: mol_type = genomic DNA
tcttttctggacccacatga

SEQ ID NO: 2095 - DNA, 22 bp, Homo sapiens
  source 1..22: mol_type = genomic DNA
gacctctacatctgtatcttcc

SEQ ID NO: 2096 - DNA, 20 bp, Homo sapiens
  source 1..20: mol_type = genomic DNA
cccttcattttctgtcccat

SEQ ID NO: 2097 - DNA, 21 bp, Homo sapiens
  source 1..21: mol_type = genomic DNA
tcagccttgagtattagccta

SEQ ID NO: 2098 - DNA, 20 bp, Homo sapiens
  source 1..20: mol_type = genomic DNA
aagtttgccatgaaggtcat

SEQ ID NO: 2099 - DNA, 20 bp, Homo sapiens
  source 1..20: mol_type = genomic DNA
gacttctggttgtttcctca

SEQ ID NO: 2100 - DNA, 20 bp, Homo sapiens
  source 1..20: mol_type = genomic DNA
atgtgtctattgccctacct

SEQ ID NO: 2101 - DNA, 19 bp, Homo sapiens
  source 1..19: mol_type = genomic DNA
tgcgggaagttcacatgaa

SEQ ID NO: 2102 - DNA, 19 bp, Homo sapiens
  source 1..19: mol_type = genomic DNA
gtgaacttcaggctgctta

SEQ ID NO: 2103 - DNA, 20 bp, Homo sapiens
  source 1..20: mol_type = genomic DNA
tggtttcgtcccgtaaatag

SEQ ID NO: 2104 - DNA, 20 bp, Homo sapiens
  source 1..20: mol_type = genomic DNA
aattcctttcaatgctggct

SEQ ID NO: 2105 - DNA, 21 bp, Homo sapiens
  source 1..21: mol_type = genomic DNA
agaaagacacatatgccatgg

SEQ ID NO: 2106 - DNA, 20 bp, Homo sapiens
  source 1..20: mol_type = genomic DNA
ttgttggtgtcagttctgaa

SEQ ID NO: 2107 - DNA, 20 bp, Homo sapiens
  source 1..20: mol_type = genomic DNA
tgtaggaacagattagggca

SEQ ID NO: 2108 - DNA, 20 bp, Homo sapiens
  source 1..20: mol_type = genomic DNA
ctccaagctgatatgccatc

SEQ ID NO: 2109 - DNA, 20 bp, Homo sapiens
  source 1..20: mol_type = genomic DNA
ccacccctcatttcttcctt

SEQ ID NO: 2110 - DNA, 20 bp, Homo sapiens
  source 1..20: mol_type = genomic DNA
gggtccttcgttttctgttt

SEQ ID NO: 2111 - DNA, 21 bp, Homo sapiens
  source 1..21: mol_type = genomic DNA
taggaaacaggctaaaaggga

SEQ ID NO: 2112 - DNA, 20 bp, Homo sapiens
  source 1..20: mol_type = genomic DNA
tactgtgtagaaggcagtgt

SEQ ID NO: 2113 - DNA, 20 bp, Homo sapiens
  source 1..20: mol_type = genomic DNA
gctaaggacaaagaaccact

SEQ ID NO: 2114 - DNA, 18 bp, Homo sapiens
  source 1..18: mol_type = genomic DNA
aaaaaaaaaaaaaaaaaa

SEQ ID NO: 2115 - DNA, 20 bp, Homo sapiens
  source 1..20: mol_type = genomic DNA
tggctaagaccaggattgtt

SEQ ID NO: 2116 - DNA, 18 bp, Homo sapiens
  source 1..18: mol_type = genomic DNA
aaaaaaaaaaaaaaaaaa

SEQ ID NO: 2117 - DNA, 20 bp, Homo sapiens
  source 1..20: mol_type = genomic DNA
tgataggcagatcattcccc

SEQ ID NO: 2118 - DNA, 20 bp, Homo sapiens
  source 1..20: mol_type = genomic DNA
gcaaatggcaaagggaaaac

SEQ ID NO: 2119 - DNA, 19 bp, Homo sapiens
  source 1..19: mol_type = genomic DNA
cacggctagtgctcatttt

SEQ ID NO: 2120 - DNA, 21 bp, Homo sapiens
  source 1..21: mol_type = genomic DNA
ccgtaatacccaagtcatctg

SEQ ID NO: 2121 - DNA, 22 bp, Homo sapiens
  source 1..22: mol_type = genomic DNA
agcaaactaaaacagcaacttc

SEQ ID NO: 2122 - DNA, 19 bp, Homo sapiens
  source 1..19: mol_type = genomic DNA
agcctgctatcttcactgg

SEQ ID NO: 2123 - DNA, 23 bp, Homo sapiens
  source 1..23: mol_type = genomic DNA
accacatatatagagactttgaa

SEQ ID NO: 2124 - DNA, 19 bp, Homo sapiens
  source 1..19: mol_type = genomic DNA
ctccagactctgcaaggat

SEQ ID NO: 2125 - DNA, 20 bp, Homo sapiens
  source 1..20: mol_type = genomic DNA
tttcctgttgctcttgatca

SEQ ID NO: 2126 - DNA, 20 bp, Homo sapiens
  source 1..20: mol_type = genomic DNA
ccacaaagatgaaggccaag

SEQ ID NO: 2127 - DNA, 21 bp, Homo sapiens
  source 1..21: mol_type = genomic DNA
ccataccttagttctcagggt

SEQ ID NO: 2128 - DNA, 20 bp, Homo sapiens
  source 1..20: mol_type = genomic DNA
gtaagagagagctgggacaa

SEQ ID NO: 2129 - DNA, 20 bp, Homo sapiens
  source 1..20: mol_type = genomic DNA
tgtgaccatcctatccacaa

SEQ ID NO: 2130 - DNA, 20 bp, Homo sapiens
  source 1..20: mol_type = genomic DNA
agaaccagttgtacgagttc

SEQ ID NO: 2131 - DNA, 20 bp, Homo sapiens
  source 1..20: mol_type = genomic DNA
agtcttctcccttccttgtc

SEQ ID NO: 2132 - DNA, 20 bp, Homo sapiens
  source 1..20: mol_type = genomic DNA
gcccttttctctctttgacc

SEQ ID NO: 2133 - DNA, 21 bp, Homo sapiens
  source 1..21: mol_type = genomic DNA
tcttgttccaagtattcctgg

SEQ ID NO: 2134 - DNA, 20 bp, Homo sapiens
  source 1..20: mol_type = genomic DNA
accactttagcccatctctt

SEQ ID NO: 2135 - DNA, 20 bp, Homo sapiens
  source 1..20: mol_type = genomic DNA
gtggtggattattgagctgg

SEQ ID NO: 2136 - DNA, 21 bp, Homo sapiens
  source 1..21: mol_type = genomic DNA
tgcttaatgggatcattgacc

SEQ ID NO: 2137 - DNA, 20 bp, Homo sapiens
  source 1..20: mol_type = genomic DNA
cccacatagtgcaaaagaca

SEQ ID NO: 2138 - DNA, 20 bp, Homo sapiens
  source 1..20: mol_type = genomic DNA
gtatgtgtgaagtagccgag

SEQ ID NO: 2139 - DNA, 20 bp, Homo sapiens
  source 1..20: mol_type = genomic DNA
tggtcctaactcagaccttt

SEQ ID NO: 2140 - DNA, 20 bp, Homo sapiens
  source 1..20: mol_type = genomic DNA
aacatgaagggaaggttgtg

SEQ ID NO: 2141 - DNA, 21 bp, Homo sapiens
  source 1..21: mol_type = genomic DNA
tatacttcaacttgcaggcag

SEQ ID NO: 2142 - DNA, 21 bp, Homo sapiens
  source 1..21: mol_type = genomic DNA
gccaaagacaatgagagagtc

SEQ ID NO: 2143 - DNA, 21 bp, Homo sapiens
  source 1..21: mol_type = genomic DNA
atttagcagccatgaccagta

SEQ ID NO: 2144 - DNA, 21 bp, Homo sapiens
  source 1..21: mol_type = genomic DNA
tgggccaattcctaatccatt

SEQ ID NO: 2145 - DNA, 23 bp, Homo sapiens
  source 1..23: mol_type = genomic DNA
cgatctcatgaataagtctgacc

SEQ ID NO: 2146 - DNA, 21 bp, Homo sapiens
  source 1..21: mol_type = genomic DNA
tggaaagcagactaacagtga

SEQ ID NO: 2147 - DNA, 21 bp, Homo sapiens
  source 1..21: mol_type = genomic DNA
gggaccctatgtagagattgt

SEQ ID NO: 2148 - DNA, 21 bp, Homo sapiens
  source 1..21: mol_type = genomic DNA
ggagcccaaggatgtattaga

SEQ ID NO: 2149 - DNA, 21 bp, Homo sapiens
  source 1..21: mol_type = genomic DNA
ctaatagctggttctgcacac

SEQ ID NO: 2150 - DNA, 22 bp, Homo sapiens
  source 1..22: mol_type = genomic DNA
gatgaaatgaatgctgactctc

SEQ ID NO: 2151 - DNA, 21 bp, Homo sapiens
  source 1..21: mol_type = genomic DNA
aaactgaagcttcgagaaccc

SEQ ID NO: 2152 - DNA, 21 bp, Homo sapiens
  source 1..21: mol_type = genomic DNA
tgccgacaactactttaggta

SEQ ID NO: 2153 - DNA, 21 bp, Homo sapiens
  source 1..21: mol_type = genomic DNA
tgtatccaatcacctgtcaga

SEQ ID NO: 2154 - DNA, 21 bp, Homo sapiens
  source 1..21: mol_type = genomic DNA
cagcaccttaagcagaaatca

SEQ ID NO: 2155 - DNA, 21 bp, Homo sapiens
  source 1..21: mol_type = genomic DNA
aagcccttcatccatttctct

SEQ ID NO: 2156 - DNA, 21 bp, Homo sapiens
  source 1..21: mol_type = genomic DNA
atcttggtgccatcttaaggt

SEQ ID NO: 2157 - DNA, 21 bp, Homo sapiens
  source 1..21: mol_type = genomic DNA
agcaaaccaatcgcaaactag

SEQ ID NO: 2158 - DNA, 22 bp, Homo sapiens
  source 1..22: mol_type = genomic DNA
aatcatcatcttcatcagctcg

SEQ ID NO: 2159 - DNA, 21 bp, Homo sapiens
  source 1..21: mol_type = genomic DNA
cctttcgccttgcttatatgg

SEQ ID NO: 2160 - DNA, 21 bp, Homo sapiens
  source 1..21: mol_type = genomic DNA
actactcaacagcctaccaaa

SEQ ID NO: 2161 - DNA, 21 bp, Homo sapiens
  source 1..21: mol_type = genomic DNA
tggagctgggaactttaatgt

SEQ ID NO: 2162 - DNA, 21 bp, Homo sapiens
  source 1..21: mol_type = genomic DNA
gaagagagagagaatgcgtgt

SEQ ID NO: 2163 - DNA, 21 bp, Homo sapiens
  source 1..21: mol_type = genomic DNA
gacatggatattctggtgcca

SEQ ID NO: 2164 - DNA, 21 bp, Homo sapiens
  source 1..21: mol_type = genomic DNA
ctgttgcaagatgacccaaat

SEQ ID NO: 2165 - DNA, 22 bp, Homo sapiens
  source 1..22: mol_type = genomic DNA
agatacacacacgttcacaaac

SEQ ID NO: 2166 - DNA, 21 bp, Homo sapiens
  source 1..21: mol_type = genomic DNA
gatggcaatgcttgataacga

SEQ ID NO: 2167 - DNA, 22 bp, Homo sapiens
  source 1..22: mol_type = genomic DNA
ttccatgaagttcctcaagact

SEQ ID NO: 2168 - DNA, 21 bp, Homo sapiens
  source 1..21: mol_type = genomic DNA
ccacccacataccctgaaatt

SEQ ID NO: 2169 - DNA, 20 bp, Homo sapiens
  source 1..20: mol_type = genomic DNA
gtaacacacggatgctgaag

SEQ ID NO: 2170 - DNA, 21 bp, Homo sapiens
  source 1..21: mol_type = genomic DNA
tggacacgaggctatttgtag

SEQ ID NO: 2171 - DNA, 21 bp, Homo sapiens
  source 1..21: mol_type = genomic DNA
ggcttaagaaggagagtggtt

SEQ ID NO: 2172 - DNA, 21 bp, Homo sapiens
  source 1..21: mol_type = genomic DNA
tagtttcctttggccttctcc

SEQ ID NO: 2173 - DNA, 21 bp, Homo sapiens
  source 1..21: mol_type = genomic DNA
ctagggttcccagttcacaaa

SEQ ID NO: 2174 - DNA, 21 bp, Homo sapiens
  source 1..21: mol_type = genomic DNA
gaaacaacattgagggcattg

SEQ ID NO: 2175 - DNA, 21 bp, Homo sapiens
  source 1..21: mol_type = genomic DNA
gagctctttgaagtagaagca

SEQ ID NO: 2176 - DNA, 20 bp, Homo sapiens
  source 1..20: mol_type = genomic DNA
ccattccaacaaagcttccg

SEQ ID NO: 2177 - DNA, 21 bp, Homo sapiens
  source 1..21: mol_type = genomic DNA
ctacttgccctattgtgtcga

SEQ ID NO: 2178 - DNA, 21 bp, Homo sapiens
  source 1..21: mol_type = genomic DNA
ccagggtgtttgaaggtagaa

SEQ ID NO: 2179 - DNA, 21 bp, Homo sapiens
  source 1..21: mol_type = genomic DNA
ctggaggtaagaaggaatgca

SEQ ID NO: 2180 - DNA, 20 bp, Homo sapiens
  source 1..20: mol_type = genomic DNA
atgtgggactctttgctctc

SEQ ID NO: 2181 - DNA, 21 bp, Homo sapiens
  source 1..21: mol_type = genomic DNA
atgaatacagctttgcatggc

SEQ ID NO: 2182 - DNA, 21 bp, Homo sapiens
  source 1..21: mol_type = genomic DNA
gttaaagcattcacagccctc

SEQ ID NO: 2183 - DNA, 21 bp, Homo sapiens
  source 1..21: mol_type = genomic DNA
ctgggacttgtctatcctcct

SEQ ID NO: 2184 - DNA, 21 bp, Homo sapiens
  source 1..21: mol_type = genomic DNA
atgtctgtccaagtgaacagt

SEQ ID NO: 2185 - DNA, 21 bp, Homo sapiens
  source 1..21: mol_type = genomic DNA
aaagtatccagacccagaacc

SEQ ID NO: 2186 - DNA, 21 bp, Homo sapiens
  source 1..21: mol_type = genomic DNA
ataggccagcactccaaataa

SEQ ID NO: 2187 - DNA, 21 bp, Homo sapiens
  source 1..21: mol_type = genomic DNA
caaatcaagtcccatggtagg

SEQ ID NO: 2188 - DNA, 21 bp, Homo sapiens
  source 1..21: mol_type = genomic DNA
ctttccgtctttataggcagc

SEQ ID NO: 2189 - DNA, 21 bp, Homo sapiens
  source 1..21: mol_type = genomic DNA
agaaatcgtgttcacagccta

SEQ ID NO: 2190 - DNA, 21 bp, Homo sapiens
  source 1..21: mol_type = genomic DNA
ccgtaaatgaagtggcttgaa

SEQ ID NO: 2191 - DNA, 21 bp, Homo sapiens
  source 1..21: mol_type = genomic DNA
cctttcttgcaaccttgagat

SEQ ID NO: 2192 - DNA, 21 bp, Homo sapiens
  source 1..21: mol_type = genomic DNA
ctctagatgctcaacctcagg

SEQ ID NO: 2193 - DNA, 21 bp, Homo sapiens
  source 1..21: mol_type = genomic DNA
aataacagtccaccagaacca

SEQ ID NO: 2194 - DNA, 21 bp, Homo sapiens
  source 1..21: mol_type = genomic DNA
tccaaggacctgcaaatgtta

SEQ ID NO: 2195 - DNA, 21 bp, Homo sapiens
  source 1..21: mol_type = genomic DNA
aggttacatcattcacccaca

SEQ ID NO: 2196 - DNA, 21 bp, Homo sapiens
  source 1..21: mol_type = genomic DNA
atgaagacaatgacatctgcg

SEQ ID NO: 2197 - DNA, 21 bp, Homo sapiens
  source 1..21: mol_type = genomic DNA
cacttgtcatggtttagggac

SEQ ID NO: 2198 - DNA, 21 bp, Homo sapiens
  source 1..21: mol_type = genomic DNA
acctccaccttattgcttcaa

SEQ ID NO: 2199 - DNA, 21 bp, Homo sapiens
  source 1..21: mol_type = genomic DNA
gaattgcaaaggatgggtagg

SEQ ID NO: 2200 - DNA, 21 bp, Homo sapiens
  source 1..21: mol_type = genomic DNA
ctgcattgtgagtccatgtaa

SEQ ID NO: 2201 - DNA, 21 bp, Homo sapiens
  source 1..21: mol_type = genomic DNA
tcctatcttcatccctcttcc

SEQ ID NO: 2202 - DNA, 21 bp, Homo sapiens
  source 1..21: mol_type = genomic DNA
ttccatttagcctcccatctg

SEQ ID NO: 2203 - DNA, 21 bp, Homo sapiens
  source 1..21: mol_type = genomic DNA
tagctttatgggccttgttct

SEQ ID NO: 2204 - DNA, 21 bp, Homo sapiens
  source 1..21: mol_type = genomic DNA
ccacctctcaaacccagattt

SEQ ID NO: 2205 - DNA, 22 bp, Homo sapiens
  source 1..22: mol_type = genomic DNA
gtcagcgtatttgggattgaat

SEQ ID NO: 2206 - DNA, 21 bp, Homo sapiens
  source 1..21: mol_type = genomic DNA
aaatctgccacccatttcttc

SEQ ID NO: 2207 - DNA, 21 bp, Homo sapiens
  source 1..21: mol_type = genomic DNA
tattctgagttctacccaggt

SEQ ID NO: 2208 - DNA, 21 bp, Homo sapiens
  source 1..21: mol_type = genomic DNA
tacatgagacccagaaacaga

SEQ ID NO: 2209 - DNA, 21 bp, Homo sapiens
  source 1..21: mol_type = genomic DNA
cttcttggcagactatcagga

SEQ ID NO: 2210 - DNA, 21 bp, Homo sapiens
  source 1..21: mol_type = genomic DNA
aagctgctaaatctgtaggga

SEQ ID NO: 2211 - DNA, 21 bp, Homo sapiens
  source 1..21: mol_type = genomic DNA
ctgaccagacctgttgactaa

SEQ ID NO: 2212 - DNA, 22 bp, Homo sapiens
  source 1..22: mol_type = genomic DNA
tgatatgttcagtttgcctacc

SEQ ID NO: 2213 - DNA, 20 bp, Homo sapiens
  source 1..20: mol_type = genomic DNA
agcttgagtttcttgctggg

SEQ ID NO: 2214 - DNA, 21 bp, Homo sapiens
  source 1..21: mol_type = genomic DNA
ttcccgcaaagtagaagctat

SEQ ID NO: 2215 - DNA, 21 bp, Homo sapiens
  source 1..21: mol_type = genomic DNA
aaacgcatacaaacaggagac

SEQ ID NO: 2216 - DNA, 21 bp, Homo sapiens
  source 1..21: mol_type = genomic DNA
cttctaaacccatcacctgct

SEQ ID NO: 2217 - DNA, 21 bp, Homo sapiens
  source 1..21: mol_type = genomic DNA
cacccaaactcacaggtacaa

SEQ ID NO: 2218 - DNA, 21 bp, Homo sapiens
  source 1..21: mol_type = genomic DNA
tgaattctgagatcgagagcc

SEQ ID NO: 2219 - DNA, 21 bp, Homo sapiens
  source 1..21: mol_type = genomic DNA
agattaactgttgcctcactg

SEQ ID NO: 2220 - DNA, 20 bp, Homo sapiens
  source 1..20: mol_type = genomic DNA
caagacagtgcattccatgg

SEQ ID NO: 2221 - DNA, 21 bp, Homo sapiens
  source 1..21: mol_type = genomic DNA
ccaaggaaagagttgagaagg

SEQ ID NO: 2222 - DNA, 21 bp, Homo sapiens
  source 1..21: mol_type = genomic DNA
tgagtgcagtcgataaggaag

SEQ ID NO: 2223 - DNA, 21 bp, Homo sapiens
  source 1..21: mol_type = genomic DNA
aacaccgagaaagagagagag

SEQ ID NO: 2224 - DNA, 21 bp, Homo sapiens
  source 1..21: mol_type = genomic DNA
tgtactgctttcgtcttatgc

SEQ ID NO: 2225 - DNA, 21 bp, Homo sapiens
  source 1..21: mol_type = genomic DNA
catattcgcactgtatagccg

SEQ ID NO: 2226 - DNA, 21 bp, Homo sapiens
  source 1..21: mol_type = genomic DNA
ctgatggattctctggtgtga

SEQ ID NO: 2227 - DNA, 21 bp, Homo sapiens
  source 1..21: mol_type = genomic DNA
tcaaggagaagagagagggta

SEQ ID NO: 2228 - DNA, 21 bp, Homo sapiens
  source 1..21: mol_type = genomic DNA
tctcccaaagcagacaaagac

SEQ ID NO: 2229 - DNA, 21 bp, Homo sapiens
  source 1..21: mol_type = genomic DNA
agtcagttgttacgtgcaaag

SEQ ID NO: 2230 - DNA, 21 bp, Homo sapiens
  source 1..21: mol_type = genomic DNA
aaaggtttgttcatcctccct

SEQ ID NO: 2231 - DNA, 21 bp, Homo sapiens
  source 1..21: mol_type = genomic DNA
acagagcacgcaatataggaa

SEQ ID NO: 2232 - DNA, 21 bp, Homo sapiens
  source 1..21: mol_type = genomic DNA
ctgcattcacccatgtacttt

SEQ ID NO: 2233 - DNA, 21 bp, Homo sapiens
  source 1..21: mol_type = genomic DNA
tccagccataccatgtctatc

SEQ ID NO: 2234 - DNA, 21 bp, Homo sapiens
  source 1..21: mol_type = genomic DNA
ctcactagggaagaacagcag

SEQ ID NO: 2235 - DNA, 22 bp, Homo sapiens
  source 1..22: mol_type = genomic DNA
tgctgggtctgagtgttataaa

SEQ ID NO: 2236 - DNA, 21 bp, Homo sapiens
  source 1..21: mol_type = genomic DNA
gttgtgtgaatggtgctgtta

SEQ ID NO: 2237 - DNA, 21 bp, Homo sapiens
  source 1..21: mol_type = genomic DNA
ggcccagaagactcttgtaat

SEQ ID NO: 2238 - DNA, 21 bp, Homo sapiens
  source 1..21: mol_type = genomic DNA
cgacctacatcagctaatggt

SEQ ID NO: 2239 - DNA, 22 bp, Homo sapiens
  source 1..22: mol_type = genomic DNA
aagggaagaataacaatggtgc

SEQ ID NO: 2240 - DNA, 21 bp, Homo sapiens
  source 1..21: mol_type = genomic DNA
atgggagtatgggagtaggaa

SEQ ID NO: 2241 - DNA, 20 bp, Homo sapiens
  source 1..20: mol_type = genomic DNA
ttggtggcttgcagagattt

SEQ ID NO: 2242 - DNA, 22 bp, Homo sapiens
  source 1..22: mol_type = genomic DNA
tcacacgatcatcatactcaca

SEQ ID NO: 2243 - DNA, 21 bp, Homo sapiens
  source 1..21: mol_type = genomic DNA
ggtagcagatgactagacgat

SEQ ID NO: 2244 - DNA, 21 bp, Homo sapiens
  source 1..21: mol_type = genomic DNA
acgcctctgtcatttcctaac

SEQ ID NO: 2245 - DNA, 21 bp, Homo sapiens
  source 1..21: mol_type = genomic DNA
cagttgactcaatggtgcaat

SEQ ID NO: 2246 - DNA, 21 bp, Homo sapiens
  source 1..21: mol_type = genomic DNA
ataggttacagattgccacgt

SEQ ID NO: 2247 - DNA, 21 bp, Homo sapiens
  source 1..21: mol_type = genomic DNA
gatgctgctatcaaaggaaca

SEQ ID NO: 2248 - DNA, 21 bp, Homo sapiens
  source 1..21: mol_type = genomic DNA
aagacaaagagatggaaggca

SEQ ID NO: 2249 - DNA, 21 bp, Homo sapiens
  source 1..21: mol_type = genomic DNA
aataccctcttcccttcctca

SEQ ID NO: 2250 - DNA, 22 bp, Homo sapiens
  source 1..22: mol_type = genomic DNA
ccaccgtcaatatttatcagct

SEQ ID NO: 2251 - DNA, 21 bp, Homo sapiens
  source 1..21: mol_type = genomic DNA
gcctcagtccaaatcttagat

SEQ ID NO: 2252 - DNA, 22 bp, Homo sapiens
  source 1..22: mol_type = genomic DNA
ccttaggattctcaaagagtgt

SEQ ID NO: 2253 - DNA, 22 bp, Homo sapiens
  source 1..22: mol_type = genomic DNA
gcagtacagattcttgaacagt

SEQ ID NO: 2254 - DNA, 22 bp, Homo sapiens
  source 1..22: mol_type = genomic DNA
agaggattagatgtcttgctgt

SEQ ID NO: 2255 - DNA, 21 bp, Homo sapiens
  source 1..21: mol_type = genomic DNA
tactgcaggcaattcaggtaa

SEQ ID NO: 2256 - DNA, 21 bp, Homo sapiens
  source 1..21: mol_type = genomic DNA
gaagaggtccagtaagtgagg

SEQ ID NO: 2257 - DNA, 21 bp, Homo sapiens
  source 1..21: mol_type = genomic DNA
ttgtgagtccttgtctccttg

SEQ ID NO: 2258 - DNA, 21 bp, Homo sapiens
  source 1..21: mol_type = genomic DNA
gacgactaagacattgcatca

SEQ ID NO: 2259 - DNA, 21 bp, Homo sapiens
  source 1..21: mol_type = genomic DNA
agaagtctctctccgttgttt

SEQ ID NO: 2260 - DNA, 21 bp, Homo sapiens
  source 1..21: mol_type = genomic DNA
cttatgtgcatcaactgtgct

SEQ ID NO: 2261 - DNA, 21 bp, Homo sapiens
  source 1..21: mol_type = genomic DNA
agtgtctctcagaatcaggac

SEQ ID NO: 2262 - DNA, 21 bp, Homo sapiens
  source 1..21: mol_type = genomic DNA
tttatttccctacgcaaagcc

SEQ ID NO: 2263 - DNA, 21 bp, Homo sapiens
  source 1..21: mol_type = genomic DNA
agcctttgatgactgagttga

SEQ ID NO: 2264 - DNA, 21 bp, Homo sapiens
  source 1..21: mol_type = genomic DNA
ttggtttctattctgcactgc

SEQ ID NO: 2265 - DNA, 21 bp, Homo sapiens
  source 1..21: mol_type = genomic DNA
ttagagcttgctagtatcggg

SEQ ID NO: 2266 - DNA, 21 bp, Homo sapiens
  source 1..21: mol_type = genomic DNA
gaaatcccaaactgcctgaaa

SEQ ID NO: 2267 - DNA, 21 bp, Homo sapiens
  source 1..21: mol_type = genomic DNA
atccttcttgtgaaccttcct

SEQ ID NO: 2268 - DNA, 22 bp, Homo sapiens
  source 1..22: mol_type = genomic DNA
accagatgcatgtgattaaagg

SEQ ID NO: 2269 - DNA, 21 bp, Homo sapiens
  source 1..21: mol_type = genomic DNA
gtgtactctaggctactgtca

SEQ ID NO: 2270 - DNA, 21 bp, Homo sapiens
  source 1..21: mol_type = genomic DNA
gtcagcagcaagtaaaggttc

SEQ ID NO: 2271 - DNA, 21 bp, Homo sapiens
  source 1..21: mol_type = genomic DNA
catctagtcaagggttccaca

SEQ ID NO: 2272 - DNA, 21 bp, Homo sapiens
  source 1..21: mol_type = genomic DNA
caagtcatgctccaaactgtt

SEQ ID NO: 2273 - DNA, 21 bp, Homo sapiens
  source 1..21: mol_type = genomic DNA
aggacttaggacaacagagaa

SEQ ID NO: 2274 - DNA, 21 bp, Homo sapiens
  source 1..21: mol_type = genomic DNA
tgcccaacaccatctctaata

SEQ ID NO: 2275 - DNA, 21 bp, Homo sapiens
  source 1..21: mol_type = genomic DNA
gccttcatcactcagaacttc

SEQ ID NO: 2276 - DNA, 21 bp, Homo sapiens
  source 1..21: mol_type = genomic DNA
agggtatctattctccggaca

SEQ ID NO: 2277 - DNA, 21 bp, Homo sapiens
  source 1..21: mol_type = genomic DNA
atttgcccaagtaagttccac

SEQ ID NO: 2278 - DNA, 21 bp, Homo sapiens
  source 1..21: mol_type = genomic DNA
tggaagtacatgggatgcatt

SEQ ID NO: 2279 - DNA, 21 bp, Homo sapiens
  source 1..21: mol_type = genomic DNA
cttgaagagttccaatgccaa

SEQ ID NO: 2280 - DNA, 21 bp, Homo sapiens
  source 1..21: mol_type = genomic DNA
cgctgctgtttaaatcgatca

SEQ ID NO: 2281 - DNA, 21 bp, Homo sapiens
  source 1..21: mol_type = genomic DNA
gctctgctttgctcaaattct

SEQ ID NO: 2282 - DNA, 22 bp, Homo sapiens
  source 1..22: mol_type = genomic DNA
tgagctccagaattagatgtgt

SEQ ID NO: 2283 - DNA, 22 bp, Homo sapiens
  source 1..22: mol_type = genomic DNA
aacacctcctttctcactacag

SEQ ID NO: 2284 - DNA, 20 bp, Homo sapiens
  source 1..20: mol_type = genomic DNA
acaaacttcattcaccgcag

SEQ ID NO: 2285 - DNA, 20 bp, Homo sapiens
  source 1..20: mol_type = genomic DNA
aactacgccacccaactaaa

SEQ ID NO: 2286 - DNA, 21 bp, Homo sapiens
  source 1..21: mol_type = genomic DNA
gcttcagtgtaaccatgactc

SEQ ID NO: 2287 - DNA, 22 bp, Homo sapiens
  source 1..22: mol_type = genomic DNA
tgcacaattaagctacttctcc

SEQ ID NO: 2288 - DNA, 21 bp, Homo sapiens
  source 1..21: mol_type = genomic DNA
caacaccaaacttgcctgaat

SEQ ID NO: 2289 - DNA, 21 bp, Homo sapiens
  source 1..21: mol_type = genomic DNA
tccacaatttctacagcaacc

SEQ ID NO: 2290 - DNA, 21 bp, Homo sapiens
  source 1..21: mol_type = genomic DNA
gtgtcatttgattggtgctct

SEQ ID NO: 2291 - DNA, 22 bp, Homo sapiens
  source 1..22: mol_type = genomic DNA
gggtgtttcagtaggttaggat

SEQ ID NO: 2292 - DNA, 21 bp, Homo sapiens
  source 1..21: mol_type = genomic DNA
tgggattctaatgtctggtgc

SEQ ID NO: 2293 - DNA, 18 bp, Homo sapiens
  source 1..18: mol_type = genomic DNA
agaggtggttggttggtt

SEQ ID NO: 2294 - DNA, 21 bp, Homo sapiens
  source 1..21: mol_type = genomic DNA
gggcatcctgtctgaaatatg

SEQ ID NO: 2295 - DNA, 21 bp, Homo sapiens
  source 1..21: mol_type = genomic DNA
aagaagcgcagatacagtaca

SEQ ID NO: 2296 - DNA, 21 bp, Homo sapiens
  source 1..21: mol_type = genomic DNA
cacagcaagtttgaacctagt

SEQ ID NO: 2297 - DNA, 21 bp, Homo sapiens
  source 1..21: mol_type = genomic DNA
agtgcaaatgatgacctgttg

SEQ ID NO: 2298 - DNA, 21 bp, Homo sapiens
  source 1..21: mol_type = genomic DNA
gaactgttgcatgagaggtac

SEQ ID NO: 2299 - DNA, 21 bp, Homo sapiens
  source 1..21: mol_type = genomic DNA
ctttgtccttctctgttgtgt

SEQ ID NO: 2300 - DNA, 22 bp, Homo sapiens
  source 1..22: mol_type = genomic DNA
tttcttctagagtccagaggtg

SEQ ID NO: 2301 - DNA, 21 bp, Homo sapiens
  source 1..21: mol_type = genomic DNA
attctcttctctcttccagcc

SEQ ID NO: 2302 - DNA, 21 bp, Homo sapiens
  source 1..21: mol_type = genomic DNA
tatggctttgctaccttgtca

SEQ ID NO: 2303 - DNA, 21 bp, Homo sapiens
  source 1..21: mol_type = genomic DNA
ctatttctctggctcttgacc

SEQ ID NO: 2304 - DNA, 21 bp, Homo sapiens
  source 1..21: mol_type = genomic DNA
ttcttaaacctctgtgtggct

SEQ ID NO: 2305 - DNA, 21 bp, Homo sapiens
  source 1..21: mol_type = genomic DNA
tggacaaacaagaactgggta

SEQ ID NO: 2306 - DNA, 21 bp, Homo sapiens
  source 1..21: mol_type = genomic DNA
ccatgatcactgaaaccaaca

SEQ ID NO: 2307 - DNA, 21 bp, Homo sapiens
  source 1..21: mol_type = genomic DNA
ccatatgccctgctctttaag

SEQ ID NO: 2308 - DNA, 21 bp, Homo sapiens
  source 1..21: mol_type = genomic DNA
gggtggacaaagcaattcaaa

SEQ ID NO: 2309 - DNA, 22 bp, Homo sapiens
  source 1..22: mol_type = genomic DNA
cagcattcaattcatccttgtg

SEQ ID NO: 2310 - DNA, 21 bp, Homo sapiens
  source 1..21: mol_type = genomic DNA
aagtagaagcaagccctgaat

SEQ ID NO: 2311 - DNA, 22 bp, Homo sapiens
  source 1..22: mol_type = genomic DNA
gtgtggtagggatgagaattat

SEQ ID NO: 2312 - DNA, 20 bp, Homo sapiens
  source 1..20: mol_type = genomic DNA
tcaggtaagcttccctccac

SEQ ID NO: 2313 - DNA, 21 bp, Homo sapiens
  source 1..21: mol_type = genomic DNA
actggttgtagaaaggacctc

SEQ ID NO: 2314 - DNA, 21 bp, Homo sapiens
  source 1..21: mol_type = genomic DNA
agtaagaggccagaagtcaga

SEQ ID NO: 2315 - DNA, 21 bp, Homo sapiens
  source 1..21: mol_type = genomic DNA
gcagtgcaggcctatatatag

SEQ ID NO: 2316 - DNA, 21 bp, Homo sapiens
  source 1..21: mol_type = genomic DNA
aaatctctgagtcggccataa

SEQ ID NO: 2317 - DNA, 20 bp, Homo sapiens
  source 1..20: mol_type = genomic DNA
aggcatggcaaacttacttg

SEQ ID NO: 2318 - DNA, 21 bp, Homo sapiens
  source 1..21: mol_type = genomic DNA
catttcactttcgaggatggt

SEQ ID NO: 2319 - DNA, 21 bp, Homo sapiens
  source 1..21: mol_type = genomic DNA
gtcagactaaagtgaggacca

SEQ ID NO: 2320 - DNA, 21 bp, Homo sapiens
  source 1..21: mol_type = genomic DNA
ccagccctacctaaagtgaat

SEQ ID NO: 2321 - DNA, 21 bp, Homo sapiens
  source 1..21: mol_type = genomic DNA
ccctttcacaagactcttctc

SEQ ID NO: 2322 - DNA, 18 bp, Homo sapiens
  source 1..18: mol_type = genomic DNA
aaaaaaaaaaaaaaaaaa

SEQ ID NO: 2323 - DNA, 22 bp, Homo sapiens
  source 1..22: mol_type = genomic DNA
ccaaatgtagaacaggatcagc

SEQ ID NO: 2324 - DNA, 20 bp, Homo sapiens
  source 1..20: mol_type = genomic DNA
tagcagtaggtgtggctttc

SEQ ID NO: 2325 - DNA, 21 bp, Homo sapiens
  source 1..21: mol_type = genomic DNA
ttggattctcttggttgtgag

SEQ ID NO: 2326 - DNA, 22 bp, Homo sapiens
  source 1..22: mol_type = genomic DNA
caacgctttggtatagtttgtg

SEQ ID NO: 2327 - DNA, 21 bp, Homo sapiens
  source 1..21: mol_type = genomic DNA
ccaggtgccatcgttaaagaa

SEQ ID NO: 2328 - DNA, 18 bp, Homo sapiens
  source 1..18: mol_type = genomic DNA
aaaaaaaaaaaaaaaaaa

SEQ ID NO: 2329 - DNA, 22 bp, Homo sapiens
  source 1..22: mol_type = genomic DNA
ggataagtcaactaccatggtt

SEQ ID NO: 2330 - DNA, 21 bp, Homo sapiens
  source 1..21: mol_type = genomic DNA
aatggaattactcagctgtgg

SEQ ID NO: 2331 - DNA, 21 bp, Homo sapiens
  source 1..21: mol_type = genomic DNA
ggcagaaactgatagagactg

SEQ ID NO: 2332 - DNA, 21 bp, Homo sapiens
  source 1..21: mol_type = genomic DNA
accatgttctgagtacctctt

SEQ ID NO: 2333 - DNA, 23 bp, Homo sapiens
  source 1..23: mol_type = genomic DNA
agtcctgaatcaatgtctaacac

SEQ ID NO: 2334 - DNA, 20 bp, Homo sapiens
  source 1..20: mol_type = genomic DNA
tggtccctgtgctttgatat

SEQ ID NO: 2335 - DNA, 20 bp, Homo sapiens
  source 1..20: mol_type = genomic DNA
tggcttttctttcctcggta

SEQ ID NO: 2336 - DNA, 20 bp, Homo sapiens
  source 1..20: mol_type = genomic DNA
ccaaggctgctttaattcca

SEQ ID NO: 2337 - DNA, 20 bp, Homo sapiens
  source 1..20: mol_type = genomic DNA
caaactatcgctgaggacct

SEQ ID NO: 2338 - DNA, 20 bp, Homo sapiens
  source 1..20: mol_type = genomic DNA
gtctgctgccattgagttat

SEQ ID NO: 2339 - DNA, 20 bp, Homo sapiens
  source 1..20: mol_type = genomic DNA
gctcaccctctcttctctct

SEQ ID NO: 2340 - DNA, 20 bp, Homo sapiens
  source 1..20: mol_type = genomic DNA
acctgtttctcccagttaca

SEQ ID NO: 2341 - DNA, 20 bp, Homo sapiens
  source 1..20: mol_type = genomic DNA
gcccatgaaagagaaaccag

SEQ ID NO: 2342 - DNA, 20 bp, Homo sapiens
  source 1..20: mol_type = genomic DNA
ctccatcagtgcagaagtcc

SEQ ID NO: 2343 - DNA, 20 bp, Homo sapiens
  source 1..20: mol_type = genomic DNA
acagtcagcagccctaaaat

SEQ ID NO: 2344 - DNA, 20 bp, Homo sapiens
  source 1..20: mol_type = genomic DNA
gcctccttcacataatgcag

SEQ ID NO: 2345 - DNA, 20 bp, Homo sapiens
  source 1..20: mol_type = genomic DNA
ttgtcaacagagagtcagct

SEQ ID NO: 2346 - DNA, 20 bp, Homo sapiens
  source 1..20: mol_type = genomic DNA
ctgaaatggtctgggagtct

SEQ ID NO: 2347 - DNA, 20 bp, Homo sapiens
  source 1..20: mol_type = genomic DNA
tcaaagacagagtgagtgga

SEQ ID NO: 2348 - DNA, 21 bp, Homo sapiens
  source 1..21: mol_type = genomic DNA
tttgggggttacacttcatag

SEQ ID NO: 2349 - DNA, 21 bp, Homo sapiens
  source 1..21: mol_type = genomic DNA
agccagcagaataataccagg

SEQ ID NO: 2350 - DNA, 20 bp, Homo sapiens
  source 1..20: mol_type = genomic DNA
acctcatcttttgtcagcct

SEQ ID NO: 2351 - DNA, 20 bp, Homo sapiens
  source 1..20: mol_type = genomic DNA
acagttccataggcaggttt

SEQ ID NO: 2352 - DNA, 21 bp, Homo sapiens
  source 1..21: mol_type = genomic DNA
gcagttccagatccaatatgc

SEQ ID NO: 2353 - DNA, 20 bp, Homo sapiens
  source 1..20: mol_type = genomic DNA
tttgggaaagatgggagagc

SEQ ID NO: 2354 - DNA, 21 bp, Homo sapiens
  source 1..21: mol_type = genomic DNA
ttgcaggtaaggtacagaaga

SEQ ID NO: 2355 - DNA, 19 bp, Homo sapiens
  source 1..19: mol_type = genomic DNA
cttcagctgcatcttgagc

SEQ ID NO: 2356 - DNA, 20 bp, Homo sapiens
  source 1..20: mol_type = genomic DNA
ggcacttcaaaaacaaaccc

SEQ ID NO: 2357 - DNA, 20 bp, Homo sapiens
  source 1..20: mol_type = genomic DNA
agggttttatggtctcctgg

SEQ ID NO: 2358 - DNA, 21 bp, Homo sapiens
  source 1..21: mol_type = genomic DNA
tcaacacggagaactgaaaac

SEQ ID NO: 2359 - DNA, 22 bp, Homo sapiens
  source 1..22: mol_type = genomic DNA
tccgtgtaaatgaacaaagcac

SEQ ID NO: 2360 - DNA, 20 bp, Homo sapiens
  source 1..20: mol_type = genomic DNA
ttcagggaatggtttgcatt

SEQ ID NO: 2361 - DNA, 20 bp, Homo sapiens
  source 1..20: mol_type = genomic DNA
gagatgccattcccaaaagg

SEQ ID NO: 2362 - DNA, 20 bp, Homo sapiens
  source 1..20: mol_type = genomic DNA
ccctaccatagtgccagatg

SEQ ID NO: 2363 - DNA, 20 bp, Homo sapiens
  source 1..20: mol_type = genomic DNA
cagctttcagtgacagagga

SEQ ID NO: 2364 - DNA, 20 bp, Homo sapiens
  source 1..20: mol_type = genomic DNA
ccaaaggcagatgagtgttt

SEQ ID NO: 2365 - DNA, 20 bp, Homo sapiens
  source 1..20: mol_type = genomic DNA
gcctgggatagaaatgggaa

SEQ ID NO: 2366 - DNA, 20 bp, Homo sapiens
  source 1..20: mol_type = genomic DNA
ggaaaggaaaggaagctgtg

SEQ ID NO: 2367 - DNA, 20 bp, Homo sapiens
  source 1..20: mol_type = genomic DNA
tcagagaggtcttgctgaag

SEQ ID NO: 2368 - DNA, 21 bp, Homo sapiens
  source 1..21: mol_type = genomic DNA
tctctctgttgcttgtttcct

SEQ ID NO: 2369 - DNA, 20 bp, Homo sapiens
  source 1..20: mol_type = genomic DNA
cgcatgtggtagatcatcag

SEQ ID NO: 2370 - DNA, 20 bp, Homo sapiens
  source 1..20: mol_type = genomic DNA
tataacaccctcacctccca

SEQ ID NO: 2371 - DNA, 21 bp, Homo sapiens
  source 1..21: mol_type = genomic DNA
cacccaaatcaccttgctatg

SEQ ID NO: 2372 - DNA, 20 bp, Homo sapiens
  source 1..20: mol_type = genomic DNA
caactaccgtggattccgtt

SEQ ID NO: 2373 - DNA, 20 bp, Homo sapiens
  source 1..20: mol_type = genomic DNA
tctatcatgagtcgcttcca

SEQ ID NO: 2374 - DNA, 20 bp, Homo sapiens
  source 1..20: mol_type = genomic DNA
tttctgtcactttctgggct

SEQ ID NO: 2375 - DNA, 21 bp, Homo sapiens
  source 1..21: mol_type = genomic DNA
cgtgtgtttctagtgcattgt

SEQ ID NO: 2376 - DNA, 20 bp, Homo sapiens
  source 1..20: mol_type = genomic DNA
gggctcagagggaatatcag

SEQ ID NO: 2377 - DNA, 20 bp, Homo sapiens
  source 1..20: mol_type = genomic DNA
ccgacgaatggatgaaagac

SEQ ID NO: 2378 - DNA, 20 bp, Homo sapiens
  source 1..20: mol_type = genomic DNA
acccaaattccatgcctact

SEQ ID NO: 2379 - DNA, 20 bp, Homo sapiens
  source 1..20: mol_type = genomic DNA
tgtacagcagtctccagaaa

SEQ ID NO: 2380 - DNA, 20 bp, Homo sapiens
  source 1..20: mol_type = genomic DNA
gccctcttaccctttctcat

SEQ ID NO: 2381 - DNA, 21 bp, Homo sapiens
  source 1..21: mol_type = genomic DNA
cattcaaagatccagaccagg

SEQ ID NO: 2382 - DNA, 19 bp, Homo sapiens
  source 1..19: mol_type = genomic DNA
atctgtgattgctgccctc

SEQ ID NO: 2383 - DNA, 20 bp, Homo sapiens
  source 1..20: mol_type = genomic DNA
ctagaaactcccaggacaga

SEQ ID NO: 2384 - DNA, 20 bp, Homo sapiens
  source 1..20: mol_type = genomic DNA
catgtgtggaaaggattggt

SEQ ID NO: 2385 - DNA, 20 bp, Homo sapiens
  source 1..20: mol_type = genomic DNA
tatgaatgaaccgtggctca

SEQ ID NO: 2386 - DNA, 20 bp, Homo sapiens
  source 1..20: mol_type = genomic DNA
aagttgagtcgtttgtccca

SEQ ID NO: 2387 - DNA, 20 bp, Homo sapiens
  source 1..20: mol_type = genomic DNA
tagtgtttcaggagcgtgtt

SEQ ID NO: 2388 - DNA, 20 bp, Homo sapiens
  source 1..20: mol_type = genomic DNA
ccaggacaagcagacatttt

SEQ ID NO: 2389 - DNA, 21 bp, Homo sapiens
  source 1..21: mol_type = genomic DNA
gctgctggtgatttttgaaga

SEQ ID NO: 2390 - DNA, 20 bp, Homo sapiens
  source 1..20: mol_type = genomic DNA
ctctgggcaaacaagaaacc

SEQ ID NO: 2391 - DNA, 20 bp, Homo sapiens
  source 1..20: mol_type = genomic DNA
gtgtgtgtttgtggaagtgt

SEQ ID NO: 2392 - DNA, 21 bp, Homo sapiens
  source 1..21: mol_type = genomic DNA
aaagcccaatctctctggtta

SEQ ID NO: 2393 - DNA, 20 bp, Homo sapiens
  source 1..20: mol_type = genomic DNA
taggcgggcttattgtgttt

SEQ ID NO: 2394 - DNA, 20 bp, Homo sapiens
  source 1..20: mol_type = genomic DNA
tcaatgtaaactgcccggag

SEQ ID NO: 2395 - DNA, 21 bp, Homo sapiens
  source 1..21: mol_type = genomic DNA
atgggagtcgaatggtgtaaa

SEQ ID NO: 2396 - DNA, 20 bp, Homo sapiens
  source 1..20: mol_type = genomic DNA
taacatttgagggcatggga

SEQ ID NO: 2397 - DNA, 20 bp, Homo sapiens
  source 1..20: mol_type = genomic DNA
cagaataccctcactgtgct

SEQ ID NO: 2398 - DNA, 20 bp, Homo sapiens
  source 1..20: mol_type = genomic DNA
ggagataacagcagaggtcc

SEQ ID NO: 2399 - DNA, 20 bp, Homo sapiens
  source 1..20: mol_type = genomic DNA
tgtgggtgatatctgtgtct

SEQ ID NO: 2400 - DNA, 20 bp, Homo sapiens
  source 1..20: mol_type = genomic DNA
gccatcctgtaactgaatgc

SEQ ID NO: 2401 - DNA, 20 bp, Homo sapiens
  source 1..20: mol_type = genomic DNA
gtattttccctttgccgcag

SEQ ID NO: 2402 - DNA, 20 bp, Homo sapiens
  source 1..20: mol_type = genomic DNA
attacagcaaagaacgtggc

SEQ ID NO: 2403 - DNA, 20 bp, Homo sapiens
  source 1..20: mol_type = genomic DNA
tctgtgtgttttgcattggt

SEQ ID NO: 2404 - DNA, 20 bp, Homo sapiens
  source 1..20: mol_type = genomic DNA
gtgacagttttccaaggcat

SEQ ID NO: 2405 - DNA, 20 bp, Homo sapiens
  source 1..20: mol_type = genomic DNA
gcattactttttcgcacact

SEQ ID NO: 2406 - DNA, 20 bp, Homo sapiens
  source 1..20: mol_type = genomic DNA
ggggattgttttaagcaggc

SEQ ID NO: 2407 - DNA, 20 bp, Homo sapiens
  source 1..20: mol_type = genomic DNA
ccattgttctcaccaactct

SEQ ID NO: 2408 - DNA, 19 bp, Homo sapiens
  source 1..19: mol_type = genomic DNA
cctgaaacacaagcagcag

SEQ ID NO: 2409 - DNA, 20 bp, Homo sapiens
  source 1..20: mol_type = genomic DNA
agctgcctatttgattggtg

SEQ ID NO: 2410 - DNA, 20 bp, Homo sapiens
  source 1..20: mol_type = genomic DNA
cagtacagtcagccttcctt

SEQ ID NO: 2411 - DNA, 20 bp, Homo sapiens
  source 1..20: mol_type = genomic DNA
tgcattcaaactaccccaag

SEQ ID NO: 2412 - DNA, 20 bp, Homo sapiens
  source 1..20: mol_type = genomic DNA
ccgaaaagaggcaagcaatt

SEQ ID NO: 2413 - DNA, 20 bp, Homo sapiens
  source 1..20: mol_type = genomic DNA
gtcacctcaacctaactcca

SEQ ID NO: 2414 - DNA, 20 bp, Homo sapiens
  source 1..20: mol_type = genomic DNA
gcaacagtctacccgtctag

SEQ ID NO: 2415 - DNA, 20 bp, Homo sapiens
  source 1..20: mol_type = genomic DNA
atcaatgctctgacctcctg

SEQ ID NO: 2416 - DNA, 21 bp, Homo sapiens
  source 1..21: mol_type = genomic DNA
atacatcaggcctccagaatt

SEQ ID NO: 2417 - DNA, 22 bp, Homo sapiens
  source 1..22: mol_type = genomic DNA
cacatctttagagctcaggtga

SEQ ID NO: 2418 - DNA, 21 bp, Homo sapiens
  source 1..21: mol_type = genomic DNA
ccatcacttcacaatccacac

SEQ ID NO: 2419 - DNA, 20 bp, Homo sapiens
  source 1..20: mol_type = genomic DNA
aatcctgcagtcatcttccc

SEQ ID NO: 2420 - DNA, 21 bp, Homo sapiens
  source 1..21: mol_type = genomic DNA
caagtctggtttgtgagaagc

SEQ ID NO: 2421 - DNA, 21 bp, Homo sapiens
  source 1..21: mol_type = genomic DNA
gggagcttctgtagtctttga

SEQ ID NO: 2422 - DNA, 21 bp, Homo sapiens
  source 1..21: mol_type = genomic DNA
taaggagagcaggacttacag

SEQ ID NO: 2423 - DNA, 21 bp, Homo sapiens
  source 1..21: mol_type = genomic DNA
ccaacggttcatttgtcgtat

SEQ ID NO: 2424 - DNA, 21 bp, Homo sapiens
  source 1..21: mol_type = genomic DNA
ccttgctctgttaatgggttt

SEQ ID NO: 2425 - DNA, 21 bp, Homo sapiens
  source 1..21: mol_type = genomic DNA
aacaatgcttaacgggaatcc

SEQ ID NO: 2426 - DNA, 21 bp, Homo sapiens
  source 1..21: mol_type = genomic DNA
gcagagttcatagaagggtca

SEQ ID NO: 2427 - DNA, 21 bp, Homo sapiens
  source 1..21: mol_type = genomic DNA
aaaccgagacgaccacctaat

SEQ ID NO: 2428 - DNA, 21 bp, Homo sapiens
  source 1..21: mol_type = genomic DNA
gagtgatgatgagccatgatg

SEQ ID NO: 2429 - DNA, 21 bp, Homo sapiens
  source 1..21: mol_type = genomic DNA
ggatattggagatagcaggca

SEQ ID NO: 2430 - DNA, 21 bp, Homo sapiens
  source 1..21: mol_type = genomic DNA
gtttggcactgcaactagata

SEQ ID NO: 2431 - DNA, 21 bp, Homo sapiens
  source 1..21: mol_type = genomic DNA
tgaaataagggaagccacaca

SEQ ID NO: 2432 - DNA, 21 bp, Homo sapiens
  source 1..21: mol_type = genomic DNA
tccttagtgtgccaattagcc

SEQ ID NO: 2433 - DNA, 20 bp, Homo sapiens
  source 1..20: mol_type = genomic DNA
ttaatgtggagagacaggcc

SEQ ID NO: 2434 - DNA, 21 bp, Homo sapiens
  source 1..21: mol_type = genomic DNA
caatgcatcttactcaccctt

SEQ ID NO: 2435 - DNA, 21 bp, Homo sapiens
  source 1..21: mol_type = genomic DNA
agtatggaagtgggaattgga

SEQ ID NO: 2436 - DNA, 21 bp, Homo sapiens
  source 1..21: mol_type = genomic DNA
ttgcttccacagaaactcttc

SEQ ID NO: 2437 - DNA, 21 bp, Homo sapiens
  source 1..21: mol_type = genomic DNA
aaccgacctattccaaagtct

SEQ ID NO: 2438 - DNA, 21 bp, Homo sapiens
  source 1..21: mol_type = genomic DNA
tgtgaagcgaatacagctcaa

SEQ ID NO: 2439 - DNA, 21 bp, Homo sapiens
  source 1..21: mol_type = genomic DNA
gttctaactacaccaggctct

SEQ ID NO: 2440 - DNA, 21 bp, Homo sapiens
  source 1..21: mol_type = genomic DNA
gtatgagtgtaggtgtggagg

SEQ ID NO: 2441 - DNA, 21 bp, Homo sapiens
  source 1..21: mol_type = genomic DNA
aatctggatctagcgaaggac

SEQ ID NO: 2442 - DNA, 21 bp, Homo sapiens
  source 1..21: mol_type = genomic DNA
taatgagaaggcaggatgagg

SEQ ID NO: 2443 - DNA, 21 bp, Homo sapiens
  source 1..21: mol_type = genomic DNA
aagacaactctctaggcctca

SEQ ID NO: 2444 - DNA, 21 bp, Homo sapiens
  source 1..21: mol_type = genomic DNA
gtttatggttgtccctggaga

SEQ ID NO: 2445 - DNA, 21 bp, Homo sapiens
  source 1..21: mol_type = genomic DNA
tccaccttctgatcacacaat

SEQ ID NO: 2446 - DNA, 21 bp, Homo sapiens
  source 1..21: mol_type = genomic DNA
aagatcaggtaccaaggcatt

SEQ ID NO: 2447 - DNA, 21 bp, Homo sapiens
  source 1..21: mol_type = genomic DNA
atgatgtgaagtccatggtga

SEQ ID NO: 2448 - DNA, 21 bp, Homo sapiens
  source 1..21: mol_type = genomic DNA
tccaaattgacttccatgagc

SEQ ID NO: 2449 - DNA, 21 bp, Homo sapiens
  source 1..21: mol_type = genomic DNA
gtggtttcaggaatttggagg

SEQ ID NO: 2450 - DNA, 22 bp, Homo sapiens
  source 1..22: mol_type = genomic DNA
tatttgctgcttcattcttccc

SEQ ID NO: 2451 - DNA, 21 bp, Homo sapiens
  source 1..21: mol_type = genomic DNA
aagtcattacgtcccacactg

SEQ ID NO: 2452 - DNA, 21 bp, Homo sapiens
  source 1..21: mol_type = genomic DNA
aaagtcatcagaagggtagca

SEQ ID NO: 2453 - DNA, 21 bp, Homo sapiens
  source 1..21: mol_type = genomic DNA
aatgatgccgaacagtgagta

SEQ ID NO: 2454 - DNA, 21 bp, Homo sapiens
  source 1..21: mol_type = genomic DNA
aatgtaagacagggacagaga

SEQ ID NO: 2455 - DNA, 21 bp, Homo sapiens
  source 1..21: mol_type = genomic DNA
tgaattccacagtccagtcaa

SEQ ID NO: 2456 - DNA, 21 bp, Homo sapiens
  source 1..21: mol_type = genomic DNA
aatgccttcaaagacagtgac

SEQ ID NO: 2457 - DNA, 21 bp, Homo sapiens
  source 1..21: mol_type = genomic DNA
cacacctgcaattgagatgaa

SEQ ID NO: 2458 - DNA, 21 bp, Homo sapiens
  source 1..21: mol_type = genomic DNA
gtcatgatgatgcaacagcta

SEQ ID NO: 2459 - DNA, 21 bp, Homo sapiens
  source 1..21: mol_type = genomic DNA
tttcacggtaagaggagcaaa

SEQ ID NO: 2460 - DNA, 21 bp, Homo sapiens
  source 1..21: mol_type = genomic DNA
ttctctctaggcaggtgaact

SEQ ID NO: 2461 - DNA, 21 bp, Homo sapiens
  source 1..21: mol_type = genomic DNA
accctttgaaagaaccaggaa

SEQ ID NO: 2462 - DNA, 21 bp, Homo sapiens
  source 1..21: mol_type = genomic DNA
aatgagccactgttctctagg

SEQ ID NO: 2463 - DNA, 21 bp, Homo sapiens
  source 1..21: mol_type = genomic DNA
atttgcacattagggcctcaa

SEQ ID NO: 2464 - DNA, 20 bp, Homo sapiens
  source 1..20: mol_type = genomic DNA
gaacttccctgcttccttct

SEQ ID NO: 2465 - DNA, 21 bp, Homo sapiens
  source 1..21: mol_type = genomic DNA
aaatacttggctgtgaccatg

SEQ ID NO: 2466 - DNA, 21 bp, Homo sapiens
  source 1..21: mol_type = genomic DNA
aagacccttgagaacttccaa

SEQ ID NO: 2467 - DNA, 21 bp, Homo sapiens
  source 1..21: mol_type = genomic DNA
atgtgtaaagacgtcctggaa

SEQ ID NO: 2468 - DNA, 21 bp, Homo sapiens
  source 1..21: mol_type = genomic DNA
tctatgtggagggatttgaca

SEQ ID NO: 2469 - DNA, 22 bp, Homo sapiens
  source 1..22: mol_type = genomic DNA
ttcctgaagtttatggtgcaac

SEQ ID NO: 2470 - DNA, 21 bp, Homo sapiens
  source 1..21: mol_type = genomic DNA
aaggttgaatgaggatcaagc

SEQ ID NO: 2471 - DNA, 21 bp, Homo sapiens
  source 1..21: mol_type = genomic DNA
gagggaagaacacaacacatg

SEQ ID NO: 2472 - DNA, 21 bp, Homo sapiens
  source 1..21: mol_type = genomic DNA
cagactagcctacaatcctcc

SEQ ID NO: 2473 - DNA, 21 bp, Homo sapiens
  source 1..21: mol_type = genomic DNA
cattcaggttcttaagggctg

SEQ ID NO: 2474 - DNA, 21 bp, Homo sapiens
  source 1..21: mol_type = genomic DNA
gaaaggcagacgatgaaagag

SEQ ID NO: 2475 - DNA, 21 bp, Homo sapiens
  source 1..21: mol_type = genomic DNA
atctccatcagcacaggaatt

SEQ ID NO: 2476 - DNA, 21 bp, Homo sapiens
  source 1..21: mol_type = genomic DNA
gcagtgtgacatctgtgaatg

SEQ ID NO: 2477 - DNA, 21 bp, Homo sapiens
  source 1..21: mol_type = genomic DNA
agactttcctgttcctcttca

SEQ ID NO: 2478 - DNA, 21 bp, Homo sapiens
  source 1..21: mol_type = genomic DNA
tttacaatgaactagccaggc

SEQ ID NO: 2479 - DNA, 21 bp, Homo sapiens
  source 1..21: mol_type = genomic DNA
taacatctgcctgaaagcttc

SEQ ID NO: 2480 - DNA, 21 bp, Homo sapiens
  source 1..21: mol_type = genomic DNA
ctcgtgtgtgcaatttggaat

SEQ ID NO: 2481 - DNA, 21 bp, Homo sapiens
  source 1..21: mol_type = genomic DNA
ggagagatggagaagaccttt

SEQ ID NO: 2482 - DNA, 21 bp, Homo sapiens
  source 1..21: mol_type = genomic DNA
aatgtattactgtgctcccgt

SEQ ID NO: 2483 - DNA, 21 bp, Homo sapiens
  source 1..21: mol_type = genomic DNA
accacctgccactgtataaat

SEQ ID NO: 2484 - DNA, 21 bp, Homo sapiens
  source 1..21: mol_type = genomic DNA
aattcttcttctggtgcaagg

SEQ ID NO: 2485 - DNA, 21 bp, Homo sapiens
  source 1..21: mol_type = genomic DNA
ttgccctttgaactgttgatc

SEQ ID NO: 2486 - DNA, 21 bp, Homo sapiens
  source 1..21: mol_type = genomic DNA
aagcacactaaggcctgataa

SEQ ID NO: 2487 - DNA, 21 bp, Homo sapiens
  source 1..21: mol_type = genomic DNA
tcagtatccattcagcatcca

SEQ ID NO: 2488 - DNA, 20 bp, Homo sapiens
  source 1..20: mol_type = genomic DNA
taaccgaagcccatactctg

SEQ ID NO: 2489 - DNA, 21 bp, Homo sapiens
  source 1..21: mol_type = genomic DNA
tccttactccagatacccgat

SEQ ID NO: 2490 - DNA, 21 bp, Homo sapiens
  source 1..21: mol_type = genomic DNA
tctggcttctttcttggagag

SEQ ID NO: 2491 - DNA, 21 bp, Homo sapiens
  source 1..21: mol_type = genomic DNA
gcaacattcatttcatcctgc

SEQ ID NO: 2492 - DNA, 21 bp, Homo sapiens
  source 1..21: mol_type = genomic DNA
catcacgacatccatttccac

SEQ ID NO: 2493 - DNA, 21 bp, Homo sapiens
  source 1..21: mol_type = genomic DNA
gtggttattatcggtgggtga

SEQ ID NO: 2494 - DNA, 20 bp, Homo sapiens
  source 1..20: mol_type = genomic DNA
ctgccattccttgtttccaa

SEQ ID NO: 2495 - DNA, 20 bp, Homo sapiens
  source 1..20: mol_type = genomic DNA
atttggacttgaagcagcct

SEQ ID NO: 2496 - DNA, 21 bp, Homo sapiens
  source 1..21: mol_type = genomic DNA
ctgtattctttgtccaccacc

SEQ ID NO: 2497 - DNA, 21 bp, Homo sapiens
  source 1..21: mol_type = genomic DNA
gacaggacaccttggattgat

SEQ ID NO: 2498 - DNA, 20 bp, Homo sapiens
  source 1..20: mol_type = genomic DNA
gagtaattcccccgatgcag

SEQ ID NO: 2499 - DNA, 21 bp, Homo sapiens
  source 1..21: mol_type = genomic DNA
tgagaatcattgagccaaacc

SEQ ID NO: 2500 - DNA, 20 bp, Homo sapiens
  source 1..20: mol_type = genomic DNA
aattgtgagcgttagagtgc

SEQ ID NO: 2501 - DNA, 21 bp, Homo sapiens
  source 1..21: mol_type = genomic DNA
ccagtgggtcttaacattgag

SEQ ID NO: 2502 - DNA, 20 bp, Homo sapiens
  source 1..20: mol_type = genomic DNA
aaaaggctagtagagggtgc

SEQ ID NO: 2503 - DNA, 20 bp, Homo sapiens
  source 1..20: mol_type = genomic DNA
tcgctgaagaactgagacac

SEQ ID NO: 2504 - DNA, 20 bp, Homo sapiens
  source 1..20: mol_type = genomic DNA
gggaagtgattggagagagg

SEQ ID NO: 2505 - DNA, 20 bp, Homo sapiens
  source 1..20: mol_type = genomic DNA
ccgcttggtatagagtgctg

SEQ ID NO: 2506 - DNA, 20 bp, Homo sapiens
  source 1..20: mol_type = genomic DNA
ttgaggttgtcaggaaagct

SEQ ID NO: 2507 - DNA, 20 bp, Homo sapiens
  source 1..20: mol_type = genomic DNA
tcttgggaaagggtcattct

SEQ ID NO: 2508 - DNA, 19 bp, Homo sapiens
  source 1..19: mol_type = genomic DNA
tctcttccatgcactccac

SEQ ID NO: 2509 - DNA, 19 bp, Homo sapiens
  source 1..19: mol_type = genomic DNA
gatctgaccctctgctcac

SEQ ID NO: 2510 - DNA, 20 bp, Homo sapiens
  source 1..20: mol_type = genomic DNA
cctgaaagatgcatggttgg

SEQ ID NO: 2511 - DNA, 20 bp, Homo sapiens
  source 1..20: mol_type = genomic DNA
gccacagaacaaccagattc

SEQ ID NO: 2512 - DNA, 20 bp, Homo sapiens
  source 1..20: mol_type = genomic DNA
tggggttaagagctcaagag

SEQ ID NO: 2513 - DNA, 20 bp, Homo sapiens
  source 1..20: mol_type = genomic DNA
agtgtggatgacttctgcaa

SEQ ID NO: 2514 - DNA, 20 bp, Homo sapiens
  source 1..20: mol_type = genomic DNA
gccccattatcctcctttgt

SEQ ID NO: 2515 - DNA, 21 bp, Homo sapiens
  source 1..21: mol_type = genomic DNA
caaatcagacccactaagcac

SEQ ID NO: 2516 - DNA, 20 bp, Homo sapiens
  source 1..20: mol_type = genomic DNA
tgttttggactgcttcactc

SEQ ID NO: 2517 - DNA, 21 bp, Homo sapiens
  source 1..21: mol_type = genomic DNA
attatcatgctcactcctcca

SEQ ID NO: 2518 - DNA, 19 bp, Homo sapiens
  source 1..19: mol_type = genomic DNA
gacatagcacgggagagta

SEQ ID NO: 2519 - DNA, 20 bp, Homo sapiens
  source 1..20: mol_type = genomic DNA
gctagtggcgttttaggaaa

SEQ ID NO: 2520 - DNA, 19 bp, Homo sapiens
  source 1..19: mol_type = genomic DNA
tcgcttggaagtcatagcc

SEQ ID NO: 2521 - DNA, 23 bp, Homo sapiens
  source 1..23: mol_type = genomic DNA
cagagctgctttgaagataatcc

SEQ ID NO: 2522 - DNA, 20 bp, Homo sapiens
  source 1..20: mol_type = genomic DNA
gaagcctgatagatgtgcct

SEQ ID NO: 2523 - DNA, 20 bp, Homo sapiens
  source 1..20: mol_type = genomic DNA
tacctctgcctccaattgtc

SEQ ID NO: 2524 - DNA, 20 bp, Homo sapiens
  source 1..20: mol_type = genomic DNA
cccatgtagacaaagtgctt

SEQ ID NO: 2525 - DNA, 20 bp, Homo sapiens
  source 1..20: mol_type = genomic DNA
ggcaggtttgtcttacagtt

SEQ ID NO: 2526 - DNA, 20 bp, Homo sapiens
  source 1..20: mol_type = genomic DNA
tgtgagattgcattcccctt

SEQ ID NO: 2527 - DNA, 20 bp, Homo sapiens
  source 1..20: mol_type = genomic DNA
cgggtcagagaaagatcagg

SEQ ID NO: 2528 - DNA, 22 bp, Homo sapiens
  source 1..22: mol_type = genomic DNA
aaacatttgtaaccactccctg

SEQ ID NO: 2529 - DNA, 21 bp, Homo sapiens
  source 1..21: mol_type = genomic DNA
cctgtaatatgggactcctgg

SEQ ID NO: 2530 - DNA, 20 bp, Homo sapiens
  source 1..20: mol_type = genomic DNA
ccaaaccacacacacaaact

SEQ ID NO: 2531 - DNA, 21 bp, Homo sapiens
  source 1..21: mol_type = genomic DNA
aggagaaggacatttcacagg

SEQ ID NO: 2532 - DNA, 20 bp, Homo sapiens
  source 1..20: mol_type = genomic DNA
aggccgataagacaaggttc

SEQ ID NO: 2533 - DNA, 19 bp, Homo sapiens
  source 1..19: mol_type = genomic DNA
gtttcccatagagccctgg

SEQ ID NO: 2534 - DNA, 20 bp, Homo sapiens
  source 1..20: mol_type = genomic DNA
ctccactctctccaaccaac

SEQ ID NO: 2535 - DNA, 20 bp, Homo sapiens
  source 1..20: mol_type = genomic DNA
aaactgtgaaaggacgagga

SEQ ID NO: 2536 - DNA, 20 bp, Homo sapiens
  source 1..20: mol_type = genomic DNA
tcccttgcttttgtaccagg

SEQ ID NO: 2537 - DNA, 20 bp, Homo sapiens
  source 1..20: mol_type = genomic DNA
catgtgtgtactgtgcctca

SEQ ID NO: 2538 - DNA, 21 bp, Homo sapiens
  source 1..21: mol_type = genomic DNA
tctttcactgtcactatgggg

SEQ ID NO: 2539 - DNA, 20 bp, Homo sapiens
  source 1..20: mol_type = genomic DNA
aaatgcagcttcccaacatc

SEQ ID NO: 2540 - DNA, 20 bp, Homo sapiens
  source 1..20: mol_type = genomic DNA
gagactttctggaggacgaa

SEQ ID NO: 2541 - DNA, 22 bp, Homo sapiens
  source 1..22: mol_type = genomic DNA
gaaacgtaatttagtgactggc

SEQ ID NO: 2542 - DNA, 22 bp, Homo sapiens
  source 1..22: mol_type = genomic DNA
atgtgtctattgctacctgtga

SEQ ID NO: 2543 - DNA, 20 bp, Homo sapiens
  source 1..20: mol_type = genomic DNA
ctccttcattttgctggtgg

SEQ ID NO: 2544 - DNA, 20 bp, Homo sapiens
  source 1..20: mol_type = genomic DNA
ggtgatcatttgtctgcaca

SEQ ID NO: 2545 - DNA, 20 bp, Homo sapiens
  source 1..20: mol_type = genomic DNA
tgaagggatgaaggcagaag

SEQ ID NO: 2546 - DNA, 20 bp, Homo sapiens
  source 1..20: mol_type = genomic DNA
attgtgttgtccttccgttt

SEQ ID NO: 2547 - DNA, 20 bp, Homo sapiens
  source 1..20: mol_type = genomic DNA
ctgaagcatcactggcattg

SEQ ID NO: 2548 - DNA, 20 bp, Homo sapiens
  source 1..20: mol_type = genomic DNA
aagcttgtagtctgggtagc

SEQ ID NO: 2549 - DNA, 22 bp, Homo sapiens
  source 1..22: mol_type = genomic DNA
tccctctgtactatgtagcatg

SEQ ID NO: 2550 - DNA, 20 bp, Homo sapiens
  source 1..20: mol_type = genomic DNA
ttcatttccctttgttgccc

SEQ ID NO: 2551 - DNA, 33 bp, synthetic construct
  misc_feature 1..33: note = Synthetic oligonucleotide
  modified_base 1..5: mod_base = OTHER; note = Residues linked by the phosphorothioate bond
  modified_base 29..33: mod_base = OTHER; note = Residues linked by the phosphorothioate bond
  source 1..33: mol_type = other DNA
acactctttccctacacgacgctcttccgatct

SEQ ID NO: 2552 - DNA, 34 bp, synthetic construct
  misc_feature 1..34: note = Synthetic oligonucleotide
  modified_base 1..5: mod_base = OTHER; note = Residues linked by the phosphorothioate bond
  modified_base 30..34: mod_base = OTHER; note = Residues linked by the phosphorothioate bond
  source 1..34: mol_type = other DNA
gtgactggagttcagacgtgtgctcttccgatct

SEQ ID NO: 2553 - DNA, 13 bp, synthetic construct
  misc_feature 1..13: note = Synthetic oligonucleotide
  modified_base 1..5: mod_base = OTHER; note = Residues linked by the phosphorothioate bond
  modified_base 9..13: mod_base = OTHER; note = Residues linked by the phosphorothioate bond
  source 1..13: mol_type = other DNA
agatcggaagagc
